(19) United States
(12) Patent Application Publication
(10) Pub. No.: US 2025/0092403 A1
(43) Pub. Date: Mar. 20, 2025

(54) COMPOSITIONS AND METHODS FOR INHIBITING KETOHEXOKINASE (KHK)

(71) Applicant: Dicerna Pharmaceuticals, Inc., Lexington, MA (US)

(72) Inventors: Bob Dale BROWN, Littleton, MA (US); Henryk T. DUDEK, Belmont, MA (US); Utsav SAXENA, Watertown, MA (US); Jihye PARK, Cambridge, MA (US); Marc ABRAMS, Natick, MA (US); Martin Lee KOSER, Westford, MA (US)

(21) Appl. No.: 18/641,868

(22) Filed: Apr. 22, 2024

Related U.S. Application Data
(63) Continuation of application No. 17/717,174, filed on Apr. 11, 2022, now abandoned.
(60) Provisional application No. 63/182,277, filed on Apr. 30, 2021.
(60) Provisional application No. 63/173,775, filed on Apr. 12, 2021.

(30) Foreign Application Priority Data
Sep. 15, 2021 (EP) 21196784.9

(51) Int. Cl. C12N 15/113; A61P 1/16

(52) U.S. Cl. CPC C12N 15/1137; A61P 1/16; C12N 2310/14; C12N 2310/315; C12N 2310/321; C12N 2310/322; C12N 2310/351

(57) ABSTRACT

Oligonucleotides are provided herein that inhibit KHK expression. Also provided are compositions including the same and uses thereof, particularly uses relating to treating diseases, disorders and/or conditions associated with KHK expression.

### CROSS REFERENCE TO RELATED APPLICATIONS

[0001] This Application is a Continuation of application Ser. No. 17/717,174 filed on Apr. 11, 2022. Application Ser. No. 17/717,174 claims the benefit of U.S. Provisional Application 63/182,277 filed on Apr. 30, 2021 and also claims the benefit of U.S. Provisional Application 63/173,775 filed on Apr. 12, 2021. The entire contents of these applications are incorporated herein by reference in their entirety.

### REFERENCE TO ELECTRONIC SEQUENCE LISTING

[0002] This application contains a Sequence Listing which has been submitted electronically in.XML format and is hereby incorporated by reference in its entirety. Said.XML copy, created on Dec. 2, 2024, is named “DCY_07902.xml” and is 2,997,164 bytes in size. The sequence listing contained in this.xml file is part of the specification and is hereby incorporated by reference herein in its entirety.

### FIELD OF THE INVENTION

[0003] The invention relates to oligonucleotides that inhibit KHK expression, compositions including the same and uses thereof. The invention also relates to methods for treating diseases, disorders and/or conditions associated with KHK expression.

### BACKGROUND OF THE INVENTION

[0004] Ketohexokinase (KHK) is an important enzyme in fructose metabolism. KHK catalyzes the conversion of D-fructose to fructose-1-phosphate. Under conditions of elevated fructose consumption, a major part of fructose-1 phosphate contributes to fatty-acid and triglyceride synthesis among other things. In the liver, uncontrolled regulation of this process can lead to diseases such as non-alcoholic fatty liver disease (NAFLD) and non-alcoholic steatohepatitis (NASH). Similarly, fructose metabolism converts fructose to glucose in the liver. Increased levels of glucose can lead to glucose intolerance (i.e., pre-diabetes, type-2 diabetes, and impaired fasting glucose). Excess glucose is converted to fatty acids and triglycerides and heightens the risk of developing cardiovascular disease (e.g., hypertension). Decreasing the amount of KHK in the liver is likely to reduce the development of, or symptoms of these diseases. Strategies for targeting the KHK gene to prevent such diseases are needed. RNAi agents targeting the KHK gene have been disclosed e.g., in WO 2015/123264 and WO 2020/060986.

### SUMMARY OF THE INVENTION

[0005] The disclosure is based in part on the discovery that oligonucleotides (e.g., RNAi oligonucleotides) reduce KHK expression in the liver. Specifically, target sequences within KHK mRNA were identified and oligonucleotides that bind to these target sequences and inhibit KHK mRNA expression were generated. As demonstrated herein, the oligonucleotides inhibited murine KHK expression, and/or monkey and human KHK expression in the liver. Without being bound by theory, the oligonucleotides described herein are useful for treating a disease, disorder or condition associated with KHK expression (e.g., Non-alcoholic fatty liver disease (NAFLD), nonalcoholic steatohepatitis (NASH)). In some embodiments, the oligonucleotides described herein are useful for treating a disease, disorder or condition associated with mutations in the KHK gene.

[0006] Accordingly, in some aspects, the present disclosure provides a double stranded RNAi oligonucleotide for reducing KHK expression, the oligonucleotide comprising an antisense strand and a sense strand, wherein the antisense strand and the sense strand form a duplex region, wherein the antisense strand comprises a region of complementarity to a KHK mRNA target sequence of any one of SEQ ID NOs: 4-387 and wherein the region of complementarity is at least 15 contiguous nucleotides in length, or a pharmaceutically acceptable salt thereof. In some aspects, the present disclosure provides a double stranded RNAi oligonucleotide for reducing KHK expression, the oligonucleotide comprising an antisense strand and a sense strand, wherein the antisense strand and the sense strand form a duplex region, wherein the antisense strand comprises a region of complementarity to a KHK mRNA target sequence of any one of SEQ ID NOs: 4-387, wherein the region of complementarity is at least 15 contiguous nucleotides in length, and wherein KHK expression is reduced by at least 50%.

[0007] In any of the foregoing or related aspects, the sense strand comprises a sequence set forth in any one of SEQ ID NOs: 4-387.

[0008] In any of the foregoing or related aspects, the anti-sense strand comprises a sequence set forth in any one of SEQ ID NOs: 388-771.

[0009] In other aspects, the disclosure provides a double stranded RNAi oligonucleotide for inhibiting expression of KHK, wherein said double stranded RNAi agent comprises a sense strand and an antisense strand forming a duplex region, wherein said sense strand comprises at least 15 contiguous nucleotides differing by no more than 3 nucleotides from any one of the nucleotide sequences of SEQ ID NO: 4-387 and said antisense strand comprises at least 15 contiguous nucleotides differing by no more than 3 nucleotides from the nucleotide sequences of SEQ ID NO: 388-771, or a pharmaceutically acceptable salt thereof. In other aspects, the disclosure provides a double stranded RNAi oligonucleotide for inhibiting expression of KHK, wherein said double stranded RNAi agent comprises a sense strand and an antisense strand forming a duplex region, wherein said sense strand comprises at least 15 contiguous nucleotides differing by no more than 3 nucleotides from any one of the nucleotide sequences of SEQ ID NO:4-387 and said antisense strand comprises at least 15 contiguous nucleotides differing by no more than 3 nucleotides from the nucleotide sequences of SEQ ID NO: 388-771, and wherein KHK expression is reduced by at least 50%, or a pharmaceutically acceptable salt thereof.

[0010] In any of the foregoing or related aspects, the sense strand is 15 to 50 nucleotides in length. In some aspects, the sense strand is 18 to 36 nucleotides in length. In other aspects, the sense strand is 15 to 30 nucleotides in length. In some aspects, the antisense strand is 15-30 nucleotides in length. In some aspects, the antisense strand is 22 nucleotides in length.

[0011] In any of the foregoing or related aspects, the antisense strand and the sense strand form a duplex region of at least 19 nucleotides in length. In any of the foregoing or related aspects, the antisense strand and the sense strand form a duple region of at least 20 nucleotides in length. In any of the foregoing or related aspects, the antisense strand and the sense strand form a duplex region of 20 nucleotides in length. In some aspects, the antisense strand is 22 nucleotides in length and the antisense strand and the sense strand form a duplex region of at least 19 nucleotides in length. In some aspects, the antisense strand is 22 nucleotides in length and the antisense strand and the sense strand form a duplex region of at least 20 nucleotides in length. In some aspects, the antisense strand is 22 nucleotides in length and the antisense strand and the sense strand form a duplex region of 20 nucleotides in length.

[0012] In any of the foregoing or related aspects, the antisense strand comprises a region of complementarity of at least 19 contiguous nucleotides in length, optionally at least 20 nucleotides in length.

[0013] In any of the foregoing or related aspects, the sense strand comprises at its 3′ end a stem-loop set forth as: S1-L-S2, wherein S1 is complementary to S2, and wherein L forms a loop between S1 and S2 of 3 to 5 nucleotides in length.

[0014] In some aspects, the disclosure provides an RNAi oligonucleotide for reducing KHK expression, the oligonucleotide comprising a sense strand of 15 to 50 nucleotides in length and an antisense strand, wherein the sense strand and the antisense strand form a duplex region, wherein the antisense strand comprises a region of complementarity to a KHK mRNA target sequence of any one of SEQ ID NOs: 4-387, and wherein the region of complementarity is at least 15 contiguous nucleotides in length, or a pharmaceutically acceptable salt thereof.

[0015] In yet other aspects, the disclosure provides an RNAi oligonucleotide for reducing KHK expression, the oligonucleotide comprising a sense strand of 15 to 50 nucleotides in length and an antisense strand of 15 to 30 nucleotides in length, wherein the sense strand and the antisense strand form a duplex region, wherein the antisense strand comprises a region of complementarity to a KHK mRNA target sequence of any one of SEQ ID NOs: 4-387, and wherein the region of complementarity is at least 15 contiguous nucleotides in length, or a pharmaceutically acceptable salt thereof.

[0016] In other aspects, the disclosure provides an RNAi oligonucleotide for reducing KHK expression, the oligonucleotide comprising a sense strand of 15 to 50 nucleotides in length and an antisense strand, wherein the sense strand and the antisense strand form a duplex region, wherein the antisense strand comprises a region of complementarity to a KHK mRNA target sequence of any one of SEQ ID NOs: 4-387, and wherein the region of complementarity is 19 contiguous nucleotides in length, optionally 20 nucleotides in length, or a pharmaceutically acceptable salt thereof.

[0017] In other aspects, the disclosure provides an RNAi oligonucleotide for reducing KHK expression, the oligonucleotide comprising a sense strand of 18 to 36 nucleotides in length and an antisense strand, wherein the sense strand and the antisense strand form a duplex region, wherein the antisense strand comprises a region of complementarity to a KHK mRNA target sequence of any one of SEQ ID NOs: 4-387, and wherein the region of complementarity is 19 contiguous nucleotides in length, optionally 20 nucleotides in length, or a pharmaceutically acceptable salt thereof.

[0018] In yet other aspects, the disclosure provides an RNAi oligonucleotide for reducing KHK expression, the oligonucleotide comprising a sense strand of 18 to 36 nucleotides in length and an antisense strand of 22 nucleotides in length, wherein the sense strand and the antisense strand form a duplex region, wherein the antisense strand comprises a region of complementarity to a KHK mRNA target sequence of any one of SEQ ID NOs: 4-387, and wherein the region of complementarity is 19 contiguous nucleotides in length, optionally 20 nucleotides in length, or a pharmaceutically acceptable salt thereof.

[0019] In some aspects, the disclosure provides an RNAi oligonucleotide for reducing KHK expression, the oligonucleotide comprising a sense strand of 18 to 36 nucleotides in length and an antisense strand of 22 nucleotides in length, wherein the sense strand and the antisense strand form a duplex region, wherein the 3′ end of the sense strand comprises a stem-loop set forth as S1-L-S2, wherein S1 is complementary to S2, and wherein L forms a loop between S1 and S2 of 3-5 nucleotides in length, wherein the antisense strand comprises a region of complementarity to a KHK mRNA target sequence of any one of SEQ ID NOs: 4-387, and wherein the region of complementarity is 19 contiguous nucleotides in length, optionally 20 nucleotides in length, or a pharmaceutically acceptable salt thereof.

[0020] In other aspects, the disclosure provides an RNAi oligonucleotide for reducing KHK expression, the oligonucleotide comprising a sense strand of 36 nucleotides in length and an antisense strand of 22 nucleotides in length, wherein the sense strand and the antisense strand form a duplex region, wherein the 3′ end of the sense strand comprises a stem-loop set forth as S1-L-S2, wherein S1 is complementary to S2, and wherein L forms a loop between S1 and S2 of 3-5 nucleotides in length, wherein the antisense strand comprises a region of complementarity to a KHK mRNA target sequence of any one of SEQ ID NOs: 4-387, and wherein the region of complementarity is 19 contiguous nucleotides in length, optionally 20 nucleotides in length, or a pharmaceutically acceptable salt thereof.

[0021] In yet other aspects, the disclosure provides an RNAi oligonucleotide for reducing KHK expression, the oligonucleotide comprising a sense strand of 36 nucleotides in length and an antisense strand of 22 nucleotides in length, wherein the sense strand and the antisense strand form a duplex region of at least 19 nucleotides in length, optionally 20 nucleotides in length, wherein the 3′ end of the sense strand comprises a stem-loop set forth as S1-L-S2, wherein S1 is complementary to S2, and wherein L forms a loop between S1 and S2 of 3-5 nucleotides in length, wherein the antisense strand comprises a region of complementarity to a KHK mRNA target sequence of any one of SEQ ID NOs: 4-387, and wherein the region of complementarity is 19 contiguous nucleotides in length, optionally 20 nucleotides in length, or a pharmaceutically acceptable salt thereof.

[0022] In some aspects, the disclosure provides a RNAi oligonucleotide for reducing KHK expression, the oligonucleotide comprising:
[0023] (i) an antisense strand of 19-30 nucleotides in length, wherein the antisense strand comprises a nucleotide sequence comprising a region of complementarity to a KHK mRNA target sequence, wherein the region of complementarity is selected from SEQ ID NOs: 948-953; and
[0024] (ii) a sense strand of 19-50 nucleotides in length comprising a region of complementarity to the antisense strand,
[0025] wherein the antisense and sense strands are separate strands which form an asymmetric duplex region having an overhang of 1-4 nucleotides at the 3′ terminus of the antisense strand. In some aspects, the RNAi oligonucleotide comprises a stem-loop at the 3′ terminus, wherein the stem loop is set forth as S1-L-S2, wherein S1 is complementary to S2 and wherein L forms a loop between S1 and S2 of 3 to 5 nucleotides in length.

[0026] In any of the foregoing or related aspects, the disclosure provides an RNAi oligonucleotide comprising a stem loop set forth as S1-L-S2, wherein S1 is complementary to S2 and wherein L forms a loop between S1 and S2 of 3 to 5 nucleotides in length. In some aspects, L is a triloop or a tetraloop. In any of the foregoing or related aspects, L is a tetraloop. In some aspects, the tetraloop comprises the sequence 5′-GAAA-3′. In any of the foregoing or related aspects, S1 and S2 are 1-10 nucleotides in length and have the same length. In some aspects, S1 and S2 are 1 nucleotide, 2 nucleotides, 3 nucleotides, 4 nucleotides, 5 nucleotides, 6 nucleotides, 7 nucleotides, 8 nucleotides, 9 nucleotides, or 10 nucleotides in length. In some aspects, S1 and S2 are 6 nucleotides in length. In any of the foregoing or related aspects, the stem-loop comprises the sequence 5′-GCAGCCGAAAGGCUGC-3′ (SEQ ID NO: 871).

[0027] In any of the foregoing or related aspects, the disclosure provides an RNAi oligonucleotide comprising a nicked tetraloop structure. In some aspects, the RNAi oligonucleotide comprises a nick between the 3′ terminus of the sense strand and the 5′ terminus of the antisense strand. In some aspects, the antisense and sense strands are not covalently linked.

[0028] In any of the foregoing or related aspects, the disclosure provides an RNAi oligonucleotide wherein the antisense strand comprises a 3′ overhang of one or more nucleotides in length. In some aspects, the 3′ overhang comprises purine nucleotides. In some aspects, the 3′ overhang is 2 nucleotides in length. In some aspects, the 3′ overhang is selected from AA, GG, AG and GA. In some aspects, the 3′ overhang is GG or AA. In some aspects, the 3′ overhang is GG.

[0029] In any of the foregoing or related aspects, the disclosure provides an RNAi oligonucleotide comprising at least one modified nucleotide. In some aspects, the modified nucleotide comprises a 2′-modification. In some aspects, the 2′-modification is a modification selected from 2′-aminoethyl, 2′-fluoro, 2′-O-methyl, 2′-O-methoxyethyl, and 2′-deoxy-2′-fluoro-β-d-arabinonucleic acid. In some aspects, the 2′-modification is 2′-fluoro. In some aspects, the 2′-modification is 2′-O-methyl. In some aspects, the 2′-modification is 2′-fluoro and 2′-O-methyl.

[0030] In any of the foregoing or related aspects, the disclosure provides an RNAi oligonucleotide comprising at least one modified nucleotide, wherein about 10-15%, 10%, 11%, 12%, 13%, 14% or 15% of the nucleotides of the sense strand comprise a 2′-fluoro modification. In some aspects, about 25-35%, 25%, 26%, 27%, 28%, 29%, 30%, 31%, 32%, 33%, 34% or 35% of the nucleotides of the antisense strand comprise a 2′-fluoro modification.

[0031] In some aspects, about 25-35%, 25%, 26%, 27%, 28%, 29%, 30%, 31%, 32%, 33%, 34% or 35% of the nucleotides of the oligonucleotide comprise a 2′-fluoro modification. In some aspects, the sense strand comprises 36 nucleotides with positions 1-36 from 5′ to 3′, wherein positions 8-11 comprise a 2′-fluoro modification. In some aspects, the antisense strand comprises 22 nucleotides with positions 1-22 from 5′ to 3′, wherein positions 2, 3, 4, 5, 7, 10 and 14 comprise a 2′-fluoro modification. In some aspects, the remaining nucleotides of the sense and/or antisense strand comprise a 2′-O-methyl modification.

[0032] In any of the foregoing or related aspects, the disclosure provides an RNAi oligonucleotide wherein all of the nucleotides are modified. In some aspects, positions 8, 9, 10 and 11 (from 5′ to 3′) of the sense strand are modified. In some aspects, positions 3, 8, 9, 10, 12, 13 and 17 (from 5′ to 3′) of the sense strand are modified. In some aspects, positions 2, 3, 4, 5, 7, 10 and 14 (from 5′ to 3′) of the antisense strand are modified. In some aspects, positions 2-5, 7, 8, 10, 14, 16 and 19 (from 5′ to 3′) of the antisense strand are modified. In some aspects, positions 8, 9, 10 and 11 (from 5′ to 3′) of the sense strand and positions 2, 3, 4, 5, 7, 10 and 14 (from 5′ to 3′) of the antisense strand are modified. In some aspects, positions 3, 8, 9, 10, 12, 13 and 17 (from 5′ to 3′) of the sense strand and positions 2-5, 7, 8, 10, 14, 16 and 19 (from 5′ to 3′) of the antisense strand are modified. In some aspects, the modification is a 2′-fluoro modification.

[0033] In any of the foregoing or related aspects, the oligonucleotide comprises at least one modified internucleotide linkage. In some aspects, the at least one modified internucleotide linkage is a phosphorothioate linkage. In some aspects, the antisense strand comprises a phosphorothioate linkage (i) between positions 1 and 2, and between positions 2 and 3; or (ii) between positions 1 and 2, between positions 2 and 3, and between positions 3 and 4, wherein positions are numbered 1-4 from 5′ to 3′. In some aspects, the antisense strand is 22 nucleotides in length and comprises a phosphorothioate linkage between positions 20 and 21 and between positions 21 and 22, wherein positions are numbered 1-22 from 5′ to 3′.

[0034] In any of the foregoing or related aspects, the disclosure provides an RNAi oligonucleotide wherein the 4′-carbon of the sugar of the 5′-nucleotide of the antisense strand comprises a phosphate e analog. In some aspects, the phosphate analog oxymethylphosphonate, vinylphosphonate or malonyl phosphonate, optionally wherein the phosphate analog is a 4′-phosphate analog comprising 5′-methoxyphosphonate-4′-oxy.

[0035] In any of the foregoing or related aspects, the disclosure provides an RNAi oligonucleotide comprising an antisense strand comprising a phosphorylated nucleotide at the 5′ terminus, wherein the phosphorylated nucleotide is selected from uridine and adenosine. In some aspects, the phosphorylated nucleotide is uridine.

[0036] In any of the foregoing or related aspects, the oligonucleotide reduces or inhibits KHK expression in vivo. In any of the foregoing or related aspects, the oligonucleotide is a Dicer substrate. In some aspects, the oligonucleotide is a Dicer substrate that, upon endogenous Dicer processing, yields double-stranded nucleic acids of 19-23 nucleotides in length capable of reducing KHK expression in a mammalian cell.

[0037] In any of the foregoing or related aspects, the disclosure provides an RNAi oligonucleotide wherein at least one nucleotide of the oligonucleotide is conjugated to one or more targeting ligands. In some aspects, each targeting ligand comprises a carbohydrate, amino sugar, cholesterol, polypeptide, or lipid. In some aspects, the stem loop comprises one or more targeting ligands conjugated to one or more nucleotides of the stem loop. In some aspects, one or more targeting ligands is conjugated to one or more nucleotides of the loop. In some aspects, the loop comprises 4 nucleotides numbered 1-4 from 5′ to 3′, wherein nucleotides at positions 2, 3 and 4 each comprise one or more targeting ligands, wherein the targeting ligands are the same or different.

[0038] In any of the foregoing or related aspects, the disclosure provides an RNAi oligonucleotide wherein each targeting ligand comprises a N-acetylgalactosamine (GalNAc) moiety. In some aspects, the GalNAc moiety is a monovalent GalNAc moiety, a bivalent GalNAc moiety, a trivalent GalNAc moiety or a tetravalent GalNAc moiety. In some aspects, up to 4 nucleotides of L of the stem-loop are each conjugated to a monovalent GalNAc moiety.

[0039] In any of the foregoing or related aspects, the disclosure provides an RNAi oligonucleotide comprising an antisense strand comprising a region of complementarity, wherein the region of complementarity is fully complementary to the KHK mRNA target sequence at nucleotide positions 2-8 of the antisense strand, wherein nucleotide positions are numbered 5′ to 3′. In some aspects, the region of complementarity is fully complementary to the KHK mRNA target sequence at nucleotide positions 2-11 of the antisense strand, wherein nucleotide positions are numbered 5′ to 3′.

[0040] In any of the foregoing or related aspects, the disclosure provides an RNAi oligonucleotide wherein the sense strand comprises a nucleotide sequence of any one of SEQ ID NOs: 872-878 and 886-911.

[0041] In any of the foregoing or related aspects, the disclosure provides an RNAi oligonucleotide wherein the antisense strand comprises a nucleotide sequence of any one of SEQ ID NOs: 879-884 and 912-938.

[0042] In any of the foregoing or related aspects, the disclosure provides an RNAi oligonucleotide wherein the antisense strand comprises a nucleotide sequence selected from SEQ ID NOs: 913, 917, 918, 920, 923 and 936. In some aspects, the sense strand comprises a nucleotide sequence selected from SEQ ID NOs: 942-947. In some aspects, the sense strand comprises a nucleotide sequence selected from SEQ ID NOs: 887, 891, 892, 894, 897 and 909.

[0043] In any of the foregoing or related aspects, the disclosure provides an RNAi oligonucleotide wherein the sense and antisense strands comprise nucleotide sequences selected from the group consisting of:
[0044] (a) SEQ ID NOs: 886 and 912, respectively;
[0045] (b) SEQ ID NOs: 887 and 913, respectively;
[0046] (c) SEQ ID NOs: 910 and 937, respectively;
[0047] (d) SEQ ID NOs: 888 and 914, respectively;
[0048] (e) SEQ ID NOs: 889 and 915, respectively;
[0049] (f) SEQ ID NOs: 890 and 916, respectively;
[0050] (g) SEQ ID NOs: 891 and 917, respectively;
[0051] (h) SEQ ID NOs: 877 and 884, respectively;
[0052] (i) SEQ ID NOs: 878 and 930, respectively;
[0053] (j) SEQ ID NOs: 876 and 883, respectively;
[0054] (k) SEQ ID NOs: 875 and 882, respectively;
[0055] (l) SEQ ID NOs: 892 and 918, respectively;
[0056] (m) SEQ ID NOs: 893 and 919, respectively;
[0057] (n) SEQ ID NOs: 894 and 920, respectively;
[0058] (0) SEQ ID NOs: 904 and 931, respectively;
[0059] (p) SEQ ID NOs: 895 and 921, respectively;
[0060] (q) SEQ ID NOs: 905 and 932, respectively;
[0061] (r) SEQ ID NOs: 896 and 922, respectively;
[0062] (s) SEQ ID NOs: 911 and 938, respectively;
[0063] (t) SEQ ID NOs: 906 and 933, respectively;
[0064] (u) SEQ ID NOs: 897 and 923, respectively;
[0065] (v) SEQ ID NOs: 907 and 934, respectively;
[0066] (w) SEQ ID NOs: 908 and 935, respectively;
[0067] (x) SEQ ID NOs: 903 and 929, respectively;
[0068] (y) SEQ ID NOs: 901 and 927, respectively;
[0069] (z) SEQ ID NOs: 874 and 881, respectively;
[0070] (aa) SEQ ID NOs: 902 and 928, respectively;
[0071] (bb) SEQ ID NOs: 873 and 880, respectively;
[0072] (cc) SEQ ID NOs: 872 and 879, respectively;
[0073] (dd) SEQ ID NOs: 898 and 924, respectively;
[0074] (ee) SEQ ID NOs: 899 and 925, respectively;
[0075] (gg) SEQ ID NOs: 900 and 926, respectively; and
[0076] (hh) SEQ ID NOs: 909 and 936, respectively.

[0077] In some aspects, the disclosure provides an RNAi oligonucleotide wherein the sense and antisense strands comprise nucleotide sequences selected from the group consisting of:
[0078] (a) SEQ ID NOs: 887 and 913, respectively;
[0079] (b) SEQ ID NOs: 891 and 917, respectively;
[0080] (c) SEQ ID NOs: 892 and 918, respectively;
[0081] (d) SEQ ID NOs: 894 and 920, respectively;
[0082] (e) SEQ ID NOs: 897 and 923, respectively; and
[0083] (f) SEQ ID NOs: 909 and 936, respectively.

[0084] In some aspects, the disclosure provides an RNAi oligonucleotide wherein the sense and antisense strands comprise the nucleotide sequences set forth in SEQ ID NOs: 909 and 936, respectively. In other aspects, the disclosure provides an RNAi oligonucleotide wherein the sense and antisense strands comprise the nucleotide sequences set forth in SEQ ID NOs: 894 and 920, respectively. In yet other aspects, the disclosure provides an RNAi oligonucleotide wherein the sense and antisense strands comprise the nucleotide sequences set forth in SEQ ID NOs: 897 and 923, respectively. In some aspects, the disclosure provides an RNAi oligonucleotide wherein the sense and antisense strands comprise the nucleotide sequences set forth in SEQ ID NOs: 892 and 918, respectively. In other aspects, the disclosure provides an RNAi oligonucleotide wherein the sense and antisense strands comprise the nucleotide sequences set forth in SEQ ID NOs: 891 and 917, respectively. In yet further aspects, the disclosure provides an RNAi oligonucleotide wherein the sense and antisense strands comprise the nucleotide sequences set forth in SEQ ID NOs: 887 and 913, respectively.

[0085] In any of the foregoing or related aspects, the disclosure provides an RNAi oligonucleotide wherein the oligonucleotide as described herein achieves at least 50% knockdown of KHK mRNA. In some aspects, an oligonucleotide described herein achieves at least 50% knockdown of KHK mRNA in vitro. In some aspects, an oligonucleotide described herein achieves at least 50% knockdown of KHK mRNA in vivo. In some aspects, an oligonucleotide described herein achieves at least 50% knockdown of KHK mRNA in vitro and in vivo. In some aspects, an oligonucleotide described herein that achieves at least 50% knockdown of KHK mRNA comprises a sense strand and an antisense strand, wherein the sense and antisense strands comprise nucleotide sequences selected from the group consisting of:
[0086] (a) SEQ ID NOs: 886 and 912, respectively;
[0087] (b) SEQ ID NOs: 887 and 913, respectively;
[0088] (c) SEQ ID NOs: 910 and 937, respectively;
[0089] (d) SEQ ID NOs: 890 and 916, respectively;
[0090] (e) SEQ ID NOs: 891 and 917, respectively;
[0091] (f) SEQ ID NOs: 892 and 918, respectively;
[0092] (g) SEQ ID NOs: 893 and 919, respectively;
[0093] (h) SEQ ID NOs: 894 and 920, respectively;
[0094] (i) SEQ ID NOs: 911 and 938, respectively;
[0095] (j) SEQ ID NOs: 899 and 925, respectively;
[0096] (k) SEQ ID NOs: 900 and 926, respectively;
[0097] (l) SEQ ID NOs: 909 and 936, respectively; and
[0098] (m) SEQ ID NOs: 897 and 923, respectively.

[0099] In any of the foregoing or related aspects, the disclosure provides an RNAi oligonucleotide wherein the sense strand and the antisense strand are modified, wherein the antisense strand and the sense strand comprise one or more 2′-fluoro and 2′-O-methyl modified nucleotides and at least one phosphorothioate linkage, wherein the 4′-carbon of the sugar of the 5′-nucleotide of the antisense strand comprises a phosphate analog.

[0100] In any of the foregoing or related aspects, the disclosure provides an RNAi oligonucleotide wherein the sense strand comprises a nucleotide sequence of any one of SEQ ID NOs: 774-804.

[0101] In any of the foregoing or related aspects, the disclosure provides an RNAi oligonucleotide wherein the antisense strand comprises a nucleotide sequence of any one of SEQ ID NOs: 819-849.

[0102] In any of the foregoing or related aspects, the disclosure provides an RNAi oligonucleotide wherein the sense and antisense strands comprise nucleotide sequences selected from the group consisting of:
[0103] (a) SEQ ID NOs: 774 and 819, respectively;
[0104] (b) SEQ ID NOs: 775 and 820, respectively;
[0105] (c) SEQ ID NOs: 776 and 821, respectively;
[0106] (d) SEQ ID NOs: 777 and 822, respectively;
[0107] (e) SEQ ID NOs: 778 and 823, respectively;
[0108] (f) SEQ ID NOs: 779 and 824, respectively;
[0109] (g) SEQ ID NOs: 780 and 825, respectively;
[0110] (h) SEQ ID NOs: 781 and 826, respectively;
[0111] (i) SEQ ID NOs: 782 and 827, respectively;
[0112] (j) SEQ ID NOs: 783 and 828, respectively;
[0113] (k) SEQ ID NOs: 784 and 829, respectively;
[0114] (l) SEQ ID NOs: 785 and 830, respectively;
[0115] (m) SEQ ID NOs: 786 and 831, respectively;
[0116] (n) SEQ ID NOs: 787 and 832, respectively;
[0117] (o) SEQ ID NOs: 788 and 833, respectively;
[0118] (p) SEQ ID NOs: 789 and 834, respectively;
[0119] (q) SEQ ID NOs: 790 and 835, respectively;
[0120] (r) SEQ ID NOs: 791 and 836, respectively;
[0121] (s) SEQ ID NOs: 792 and 837, respectively;
[0122] (t) SEQ ID NOs: 793 and 838, respectively;
[0123] (u) SEQ ID NOs: 794 and 839, respectively;
[0124] (v) SEQ ID NOs: 795 and 840, respectively;
[0125] (w) SEQ ID NOs: 796 and 841, respectively;
[0126] (x) SEQ ID NOs: 797 and 842, respectively;
[0127] (y) SEQ ID NOs: 798 and 843, respectively;
[0128] (z) SEQ ID NOs: 799 and 844, respectively;
[0129] (aa) SEQ ID NOs: 800 and 845, respectively;
[0130] (bb) SEQ ID NOs: 801 and 846, respectively;
[0131] (cc) SEQ ID NOs: 802 and 847, respectively;
[0132] (dd) SEQ ID NOs: 803 and 848, respectively; and
[0133] (ee) SEQ ID NOs: 804 and 849, respectively.

[0134] In some aspects, the disclosure provides an RNAi oligonucleotide wherein the sense and antisense strands comprise nucleotide sequences selected from the group consisting of:
[0135] (a) SEQ ID NOs: 775 and 820, respectively;
[0136] (b) SEQ ID NOs: 779 and 824, respectively;
[0137] (c) SEQ ID NOs: 780 and 825, respectively;
[0138] (d) SEQ ID NOs: 782 and 827, respectively;
[0139] (e) SEQ ID NOs: 785 and 830, respectively; and
[0140] (f) SEQ ID NOs: 804 and 849, respectively.

[0141] In some aspects, the disclosure provides an RNAi oligonucleotide wherein the sense and antisense strands comprise the nucleotide sequences set forth in SEQ ID NOs: 804 and 849, respectively. In other aspects, the disclosure provides an RNAi oligonucleotide wherein the sense and antisense strands comprise the nucleotide sequences set forth in SEQ ID NOs: 782 and 827, respectively. In some aspects, the disclosure provides an RNAi oligonucleotide wherein the sense and antisense strands comprise the nucleotide sequences set forth in SEQ ID NOs: 775 and 820, respectively. In yet other aspects, the disclosure provides an RNAi oligonucleotide wherein the sense and antisense strands comprise the nucleotide sequences set forth in SEQ ID NOs: 779 and 824, respectively. In some aspects, the disclosure provides an RNAi oligonucleotide wherein the sense and antisense strands comprise the nucleotide sequences set forth in SEQ ID NOs: 780 and 825, respectively. In other aspects, the disclosure provides an RNAi oligonucleotide wherein the sense and antisense strands comprise the nucleotide sequences set forth in SEQ ID NOs: 785 and 830, respectively.

[0142] In any of the foregoing or related aspects, the disclosure provides an RNAi oligonucleotide wherein the sense strand comprises a nucleotide sequence of any one of SEQ ID NOs: 805-818.

[0143] In any of the foregoing or related aspects, the disclosure provides an RNAi oligonucleotide wherein the antisense strand comprises a nucleotide sequence of any one of SEQ ID NOs: 850-863.

[0144] In any of the foregoing or related aspects, the disclosure provides an RNAi oligonucleotide wherein the sense and antisense strands comprise nucleotide sequences selected from the group consisting of:
[0145] (a) SEQ ID NOs: 805 and 850, respectively;
[0146] (b) SEQ ID NOs: 806 and 851, respectively;
[0147] (c) SEQ ID NOs: 807 and 852, respectively;
[0148] (d) SEQ ID NOs: 808 and 853, respectively;
[0149] (e) SEQ ID NOs: 809 and 854, respectively;
[0150] (f) SEQ ID NOs: 810 and 855, respectively;
[0151] (g) SEQ ID NOs: 811 and 856, respectively;
[0152] (h) SEQ ID NOs: 812 and 857, respectively;
[0153] (i) SEQ ID NOs: 813 and 858, respectively;
[0154] (j) SEQ ID NOs: 814 and 859, respectively;
[0155] (k) SEQ ID NOs: 815 and 860, respectively;
[0156] (l) SEQ ID NOs: 816 and 861, respectively;
[0157] (m) SEQ ID NOs: 817 and 862, respectively and;
[0158] (n) SEQ ID NOs: 818 and 863, respectively.

[0159] In some aspects, the disclosure provides an RNAi oligonucleotide wherein the sense and antisense strands comprise the nucleotide sequences set forth in SEQ ID NOs: 805 and 850, respectively. In other aspects, the disclosure provides an RNAi oligonucleotide wherein the sense and antisense strands comprise the nucleotide sequences set forth in SEQ ID NOs: 809 and 854, respectively. In yet other aspects, the disclosure provides an RNAi oligonucleotide wherein the sense and antisense strands comprise the nucleotide sequences set forth in SEQ ID NOs: 810 and 855, respectively. In some aspects, the disclosure provides an RNAi oligonucleotide wherein the sense and antisense strands comprise the nucleotide sequences set forth in SEQ ID NOs: 812 and 857, respectively. In other aspects, the disclosure provides an RNAi oligonucleotide wherein the sense and antisense strands comprise the nucleotide sequences set forth in SEQ ID NOs: 815 and 860, respectively. In yet other aspects, the disclosure provides an RNAi oligonucleotide wherein the sense and antisense strands comprise the nucleotide sequences set forth in SEQ ID NOs: 818 and 863, respectively.

[0160] In some aspects, the present disclosure provides a double stranded RNAi oligonucleotide (dsRNAi) for inhibiting expression of KHK, wherein said dsRNAi comprises a sense strand and an antisense strand, the antisense strand comprising a region of complementarity to a KHK RNA transcript, e.g. KHK mRNA, wherein the sense strand comprises the sequence and all of the modifications of 5′-mG-S-mA-mA-mG-mA-mG-mA-fA-fG-fC-fA-mG-mA-mU-mC-mC-mU-mG-mU-mA-mG-mC-mA-mG-mC-mC-mG-[ademA-GalNAc]-[ademA-GalNAc]-[ademA-GalNAc]-mG-mG-mC-mU-mG-mC-3′ (SEQ ID NO: 775), and wherein the antisense strand comprises the sequence and all of the modifications of 5′-[MePhosphonate-40-mU]-S-A-S-fC-fA-fG-mG-fA-mU-mC-fU-mG-mC-mU-fU-mC-mU-mC-mU-mU-mC-S-mG-S-mG-3′ (SEQ ID NO: 820), wherein mC, mA, mG, mU=2′-OMe ribonucleosides; fA, fC, fG, fU=2′F ribonucleosides; “-”-phosphodiester linkage, “—S-”-phosphorothioate linkage, and wherein ademA-GalNAc=

[chemical structure]

or a pharmaceutically acceptable salt thereof.

[0161] In some aspects, the present disclosure provides a double stranded RNAi oligonucleotide (dsRNAi) for inhibiting expression of KHK, wherein said dsRNA comprises a sense strand and an antisense strand, the antisense strand comprising a region of complementarity to a KHK RNA transcript, e.g. KHK mRNA, wherein the sense strand comprises the sequence and all of the modifications of 5′-mC-S-mA-mG-mA-mU-mG-mU-fG-fU-fC-fU-mG-mC-mU-mA-mC-mA-mG-mA-mA-mG-mC-mA-mG-mC-mC-mG-[ademA-GalNAc]-[ademA-GalNAc]-[ademA-GalNAc]-mG-mG-mC-mU-mG-mC-3′ (SEQ ID NO: 779), and wherein the antisense strand comprises the sequence and all of the modifications of 5′-[MePhosphonate-40-mU]-S-fU-S-fC-S-fU-fG-mU-fA-mG-mC-fA-mG-mA-mC-fA-mC-mA-mU-mC-mU-mG-S-mG-S-mG-3′ (SEQ ID NO: 824), wherein mC, mA, mG, mU=2′-OMe ribonucleosides; fA, fC, fG, fU=2′F ribonucleosides; “-”=phosphodiester linkage, “—S-”=phosphorothioate linkage, and wherein ademA-GalNAc=

[chemical structure]

or a pharmaceutically acceptable salt thereof.

[0162] In some aspects, the present disclosure provides a double stranded RNAi oligonucleotide (dsRNAi) for inhibiting expression of KHK, wherein said dsRNA comprises a sense strand and an antisense strand, the antisense strand comprising a region of complementarity to a KHK RNA transcript, e.g. KHK mRNA, wherein the sense strand comprises the sequence and all of the modifications of 5′-mG-S-mA-mC-mU-mU-mU-mG-fA-fG-fA-fA-mG-mG-mU-mU-mG-mA-mU-mC-mA-mG-mC-mA-mG-mC-mC-mG-[ademA-GalNAc]-[ademA-GalNAc]-[ademA-GalNAc]-mG-mG-mC-mU-mG-mC-3′ (SEQ ID NO: 780), and wherein the antisense strand comprises the sequence and all of the modifications of 5′-[MePhosphonate-40-mU]-S-fG-S-fA-S-fU-fC-mA-fA-mC-mC-fU-mU-mC-mU-fC-mA-mA-mA-mG-mU-mC-S-mG-S-mG-3′ (SEQ ID NO: 825), wherein mC, mA, mG, mU=2′-OMe ribonucleosides; fA, fC, fG, fU=2′F ribonucleosides; “-”=phosphodiester linkage, “—S-”-phosphorothioate linkage, and wherein ademA-GalNAc=

[chemical structure]

or a pharmaceutically acceptable salt thereof.

[0163] In some aspects, the present disclosure provides a double stranded RNAi oligonucleotide (dsRNAi) for inhibiting expression of KHK, wherein said dsRNA comprises a sense strand and an antisense strand, the antisense strand comprising a region of complementarity to a KHK RNA transcript, e.g. KHK mRNA, wherein the sense strand comprises the sequence and all of the modifications of 5′-mU-S-mG-mU-mU-mU-mG-mU-fC-fA-fG-fC-mA-mA-mA-mG-mA-mU-mG-mU-mA-mG-mC-mA-mG-mC-mC-mG-[ademA-GalNAc]-[ademA-GalNAc]-[ademA-GalNAc]-mG-mG-mC-mU-mG-mC-3′ (SEQ ID NO: 785), and wherein the antisense strand comprises the sequence and all of the modifications of 5′-[MePhosphonate-40-mU]-S-fA-S-fC-fA-fU-mC-fU-mU-mU-fG-mC-mU-mG-fA-mC-mA-mA-mA-mC-mA-S-mG-S-mG-3′ (SEQ ID NO: 830), wherein mC, mA, mG, mU=2′-OMe ribonucleosides; fA, fC, fG, fU=2′F ribonucleosides; “-”=phosphodiester linkage, “—S-”=phosphorothioate linkage, and wherein ademA-GalNAc=

[chemical structure]

or a pharmaceutically acceptable salt thereof.

[0164] In some aspects, the present disclosure provides a double stranded RNAi oligonucleotide (dsRNAi) for inhibiting expression of KHK, wherein said dsRNA comprises a sense strand and an antisense strand, the antisense strand comprising a region of complementarity to a KHK RNA transcript, e.g. KHK mRNA, wherein the sense strand comprises the sequence and all of the modifications of 5′-mG-S-mC-mA-mG-mG-mA-mA-fG-fC-fA-fC-mU-mG-mA-mG-mA-mU-mU-mC-mA-mG-mC-mA-mG-mC-mC-mG-[ademA-GalNAc]-[ademA-GalNAc]-[ademA-GalNAc]-mG-mG-mC-mU-mG-mC-3′ (SEQ ID NO: 804), and wherein the antisense strand comprises the sequence and all of the modifications of 5′-[MePhosphonate-40-mU]-S-fG-S-fA-S-fA-fU-mC-fU-mC-mA-fG-mU-mG-mC-fU-mU-mC-mC-mU-mG-mC-S-mG-S-mG-3′ (SEQ ID NO: 849), wherein mC, mA, mG, mU=2′-OMe ribonucleosides; fA, fC, fG, fU-2′F ribonucleosides; “-”-phosphodiester linkage, “—S-”=phosphorothioate linkage, and wherein ademA-GalNAc=

[chemical structure]

or a pharmaceutically acceptable salt thereof.

[0165] In some aspects, the present disclosure provides a double stranded RNAi oligonucleotide (dsRNAi) for inhibiting expression of KHK, wherein said dsRNA comprises a sense strand and an antisense strand, the antisense strand comprising a region of complementarity to a KHK RNA transcript, e.g. KHK mRNA, wherein the sense strand comprises the sequence and all of the modifications of 5′-mU-S-mU-mU-mG-mA-mG-mA-fA-fG-fG-fU-mU-mG-mA-mU-mC-mU-mG-mA-mA-mG-mC-mA-mG-mC-mC-mG-[ademA-GalNAc]-[ademA-GalNAc]-[ademA-GalNAc]-mG-mG-mC-mU-mG-mC-3′ (SEQ ID NO: 782), and wherein the antisense strand comprises the sequence and all of the modifications of 5′ [MePhosphonate-40-mU]-S-fU-S-fC-S-fA-fG-mA-fU-mC-mA-fA-mC-mC-mU-fU-mC-mU-mC-mA-mA-mA-S-mG-S-mG-3′ (SEQ ID NO: 827), wherein mC, mA, mG, mU=2′-OMe ribonucleosides; fA, fC, fG, fU=2′F ribonucleosides; “-”-phosphodiester linkage, “—S-”=phosphorothioate linkage, and wherein ademA-GalNAc=

[chemical structure]

or a pharmaceutically acceptable salt thereof.

[0166] In yet other aspects, the present disclosure provides a double stranded RNAi oligonucleotide (dsRNAi) for inhibiting expression of KHK, wherein said dsRNA comprises a sense strand comprising SEQ ID NO: 775 and an antisense strand comprising SEQ ID NO: 820, the antisense strand comprising a region of complementarity to a KHK RNA transcript, e.g. KHK mRNA, wherein said dsRNA is in the form of a conjugate having the structure depicted in FIG. 10A continuing to FIG. 10B, or pharmaceutically acceptable salts thereof.

[0167] In another aspect, the present disclosure provides a double stranded RNAi oligonucleotide (dsRNAi) for inhibiting expression of KHK, wherein said dsRNA comprises a sense strand comprising SEQ ID NO: 779 and an antisense strand comprising SEQ ID NO: 824, the antisense strand comprising a region of complementarity to a KHK RNA transcript, e.g. KHK mRNA, wherein said dsRNA is in the form of a conjugate having the structure depicted in FIG. 11A continuing to FIG. 11B, or pharmaceutically acceptable salts thereof.

[0168] In another aspect, the present disclosure provides a double stranded RNAi oligonucleotide (dsRNAi) for inhibiting expression of KHK, wherein said dsRNA comprises a sense strand comprising SEQ ID NO: 780 and an antisense strand comprising SEQ ID NO: 825, the antisense strand comprising a region of complementarity to a KHK RNA transcript, e.g. KHK mRNA, wherein said dsRNA is in the form of a conjugate having the structure depicted in FIG. 12A continuing to FIG. 12B, or pharmaceutically acceptable salts thereof.

[0169] In another aspect, the present disclosure provides a double stranded RNAi oligonucleotide (dsRNAi) for inhibiting expression of KHK, wherein said dsRNA comprises a sense strand comprising SEQ ID NO: 782 and an antisense strand comprising SEQ ID NO: 827, the antisense strand comprising a region of complementarity to a KHK RNA transcript, e.g. KHK mRNA, wherein said dsRNA is in the form of a conjugate having the structure depicted in FIG. 13A continuing to FIG. 13B, or pharmaceutically acceptable salts thereof.

[0170] In another aspect, the present disclosure provides a double stranded RNAi oligonucleotide (dsRNAi) for inhibiting expression of KHK, wherein said dsRNA comprises a sense strand comprising SEQ ID NO: 785 and an antisense strand comprising SEQ ID NO: 830, the antisense strand comprising a region of complementarity to a KHK RNA transcript, e.g. KHK mRNA, wherein said dsRNA is in the form of a conjugate having the structure depicted in FIG. 14A continuing to FIG. 14B, or pharmaceutically acceptable salts thereof.

[0171] In another aspect, the present disclosure provides a double stranded RNAi oligonucleotide (dsRNAi) for inhibiting expression of KHK, wherein said dsRNA comprises a sense strand comprising SEQ ID NO: 804 and an antisense strand comprising SEQ ID NO: 849, the antisense strand comprising a region of complementarity to a KHK RNA transcript, e.g. KHK mRNA, wherein said dsRNA is in the form of a conjugate having the structure depicted in FIG. 15A continuing to FIG. 15B, or pharmaceutically acceptable salts thereof.

[0172] In some aspects, the present disclosure provides a method for treating a subject having a disease, disorder or condition associated with KHK expression, the method comprising administering to the subject a therapeutically effective amount of any RNAi oligonucleotide or pharmaceutical composition described herein, thereby treating the subject.

[0173] In some aspects, the disclosure provides a pharmaceutically acceptable salt of any of the oligonucleotides described herein. In some aspects, the present disclosure provides a pharmaceutical composition comprising any RNAi oligonucleotide described herein, and a pharmaceutically acceptable carrier, salt, delivery agent or excipient. In some aspects, the present disclosure provides a pharmaceutical composition comprising any RNAi oligonucleotide described herein, and a pharmaceutically acceptable diluent, solvent, carrier, salt and/or adjuvant. Likewise, the oligonucleotides herein may be provided in the form of their free acids.

[0174] In some aspects, the disclosure provides a method for modulating KHK expression in a target cell expressing KHK, the method comprising administering an RNAi oligonucleotide or pharmaceutical composition described herein in an effective amount to the target cell.

[0175] In some aspects, the present disclosure provides a method of delivering an oligonucleotide to a subject, the method comprising administering a pharmaceutical composition described herein.

[0176] In some aspects, the present disclosure provides a method for reducing KHK expression in a cell, a population of cells or a subject, the method comprising the step of:
[0177] i. contacting the cell or the population of cells with any RNAi oligonucleotide or pharmaceutical composition described herein; or
[0178] ii. administering to the subject any RNAi oligonucleotide or pharmaceutical composition described herein.

[0179] In any of the foregoing or related aspects, the method of reducing KHK expression comprises reducing an amount or level of KHK mRNA, an amount or level of KHK protein, or both.

[0180] In any of the foregoing or related aspects, the subject has a disease, disorder or condition associated with KHK expression. In some aspects, the disease, disorder, or condition associated with KHK expression is non-alcoholic fatty liver disease (NAFLD) and non-alcoholic steatohepatitis (NASH).

[0181] In any of the foregoing or related aspects, the RNAi oligonucleotide, or pharmaceutical composition, is administered in combination with a second composition or therapeutic agent.

[0182] In some aspects, the present disclosure provides a method for treating a subject having a disease, disorder or condition associated with KHK expression, the method comprising administering to the subject a therapeutically effective amount of an RNAi oligonucleotide comprising a sense strand and an antisense strand, or a pharmaceutically acceptable salt thereof, wherein the sense strand and antisense strand comprise nucleotide sequences selected from the group consisting of:
[0183] (a) SEQ ID NOs: 886 and 912, respectively;
[0184] (b) SEQ ID NOs: 887 and 913, respectively;
[0185] (c) SEQ ID NOs: 910 and 937, respectively;
[0186] (d) SEQ ID NOs: 888 and 914, respectively;
[0187] (e) SEQ ID NOs: 889 and 915, respectively;
[0188] (f) SEQ ID NOs: 890 and 916, respectively;
[0189] (g) SEQ ID NOs: 891 and 917, respectively;
[0190] (h) SEQ ID NOs: 877 and 884, respectively;
[0191] (i) SEQ ID NOs: 878 and 930, respectively;
[0192] (j) SEQ ID NOs: 876 and 883, respectively;
[0193] (k) SEQ ID NOs: 875 and 882, respectively;
[0194] (l) SEQ ID NOs: 892 and 918, respectively;
[0195] (m) SEQ ID NOs: 893 and 919, respectively;
[0196] (n) SEQ ID NOs: 894 and 920, respectively;
[0197] (o) SEQ ID NOs: 904 and 931, respectively;
[0198] (p) SEQ ID NOs: 895 and 921, respectively;
[0199] (q) SEQ ID NOs: 905 and 932, respectively;
[0200] (r) SEQ ID NOs: 896 and 922, respectively;
[0201] (s) SEQ ID NOs: 911 and 938, respectively;
[0202] (t) SEQ ID NOs: 906 and 933, respectively;
[0203] (u) SEQ ID NOs: 897 and 923, respectively;
[0204] (v) SEQ ID NOs: 907 and 934, respectively;
[0205] (w) SEQ ID NOs: 908 and 935, respectively;
[0206] (x) SEQ ID NOs: 903 and 929, respectively;
[0207] (y) SEQ ID NOs: 901 and 927, respectively;
[0208] (z) SEQ ID NOs: 874 and 881, respectively;
[0209] (aa) SEQ ID NOs: 902 and 928, respectively;
[0210] (bb) SEQ ID NOs: 873 and 880, respectively;
[0211] (cc) SEQ ID NOs: 872 and 879, respectively;
[0212] (dd) SEQ ID NOs: 898 and 924, respectively;
[0213] (ee) SEQ ID NOs: 899 and 925, respectively
[0214] (ff) SEQ ID NOs: 900 and 926, respectively; and
[0215] (gg) SEQ ID NOs: 909 and 936, respectively.

[0216] In some aspects, the disclosure provides an RNAi oligonucleotide wherein the sense and antisense strands comprise nucleotide sequences selected from the group consisting of:
[0217] (a) SEQ ID NOs: 887 and 913, respectively;
[0218] (b) SEQ ID NOs: 891 and 917, respectively;
[0219] (c) SEQ ID NOs: 892 and 918, respectively;
[0220] (d) SEQ ID NOs: 894 and 920, respectively;
[0221] (e) SEQ ID NOs: 897 and 923, respectively; and
[0222] (f) SEQ ID NOs: 909 and 936, respectively.

[0223] In some aspects, the disclosure provides an RNAi oligonucleotide wherein the sense and antisense strands comprise the nucleotide sequences set forth in SEQ ID NOs: 887 and 913, respectively. In other aspects, the disclosure provides an RNAi oligonucleotide wherein the sense and antisense strands comprise the nucleotide sequences set forth in SEQ ID NOs: 891 and 917, respectively. In other aspects, the disclosure provides an RNAi oligonucleotide wherein the sense and antisense strands comprise the nucleotide sequences set forth in SEQ ID NOs: 892 and 918, respectively. In other aspects, the disclosure provides an RNAi oligonucleotide wherein the sense and antisense strands comprise the nucleotide sequences set forth in SEQ ID NOs: 894 and 920, respectively. In other aspects, the disclosure provides an RNAi oligonucleotide wherein the sense and antisense strands comprise the nucleotide sequences set forth in SEQ ID NOs: 897 and 923, respectively. In other aspects, the disclosure provides an RNAi oligonucleotide wherein the sense and antisense strands comprise the nucleotide sequences set forth in SEQ ID NOs: 909 and 936, respectively.

[0224] In some aspects, the present disclosure provides a method for treating a subject having a disease, disorder or condition associated with KHK expression, the method comprising administering to the subject a therapeutically effective amount of an RNAi oligonucleotide comprising a sense strand and an antisense strand, or a pharmaceutically acceptable salt thereof, wherein the sense strand and antisense strands are selected from the group consisting of:
[0225] (a) SEQ ID NOs: 774 and 819, respectively;
[0226] (b) SEQ ID NOs: 775 and 820, respectively;
[0227] (c) SEQ ID NOs: 776 and 821, respectively;
[0228] (d) SEQ ID NOs: 777 and 822, respectively;
[0229] (e) SEQ ID NOs: 778 and 823, respectively;
[0230] (f) SEQ ID NOs: 779 and 824, respectively;
[0231] (g) SEQ ID NOs: 780 and 825, respectively;
[0232] (h) SEQ ID NOs: 781 and 826, respectively;
[0233] (i) SEQ ID NOs: 782 and 827, respectively;
[0234] (j) SEQ ID NOs: 783 and 828, respectively;
[0235] (k) SEQ ID NOs: 784 and 829, respectively;
[0236] (l) SEQ ID NOs: 785 and 830, respectively;
[0237] (m) SEQ ID NOs: 786 and 831, respectively;
[0238] (n) SEQ ID NOs: 787 and 832, respectively;
[0239] (o) SEQ ID NOs: 788 and 833, respectively;
[0240] (p) SEQ ID NOs: 789 and 834, respectively;
[0241] (q) SEQ ID NOs: 790 and 835, respectively;
[0242] (r) SEQ ID NOs: 791 and 836, respectively;
[0243] (s) SEQ ID NOs: 792 and 837, respectively;
[0244] (t) SEQ ID NOs: 793 and 838, respectively;
[0245] (u) SEQ ID NOs: 794 and 839, respectively;
[0246] (v) SEQ ID NOs: 795 and 840, respectively;
[0247] (w) SEQ ID NOs: 796 and 841, respectively;
[0248] (x) SEQ ID NOs: 797 and 842, respectively;
[0249] (y) SEQ ID NOs: 798 and 843, respectively;
[0250] (z) SEQ ID NOs: 799 and 844, respectively;
[0251] (aa) SEQ ID NOs: 800 and 845, respectively;
[0252] (bb) SEQ ID NOs: 801 and 846, respectively;
[0253] (cc) SEQ ID NOs: 802 and 847, respectively;
[0254] (dd) SEQ ID NOs: 803 and 848, respectively; and
[0255] (ee) SEQ ID NOs: 804 and 849, respectively.

[0256] In any of the foregoing or related aspects, the disclosure provides an RNAi oligonucleotide wherein the sense and antisense strands comprise nucleotide sequences selected from the group consisting of:
[0257] (a) SEQ ID NOs: 775 and 820, respectively;
[0258] (b) SEQ ID NOs: 779 and 824, respectively;
[0259] (c) SEQ ID NOs: 780 and 825, respectively;
[0260] (d) SEQ ID NOs: 782 and 827, respectively;
[0261] (e) SEQ ID NOs: 785 and 830, respectively; and
[0262] (f) SEQ ID NOs: 804 and 849, respectively.

[0263] In some aspects, the disclosure provides an RNAi oligonucleotide wherein the sense and antisense strands comprise the nucleotide sequences set forth in SEQ ID NOs: 775 and 820, respectively. In some aspects, the disclosure provides an RNAi oligonucleotide wherein the sense and antisense strands comprise the nucleotide sequences set forth in SEQ ID NOS: 779 and 824, respectively. In some aspects, the disclosure provides an RNAi oligonucleotide wherein the sense and antisense strands comprise the nucleotide sequences set forth in SEQ ID NOs: 780 and 825, respectively. In other aspects, the disclosure provides an RNAi oligonucleotide wherein the sense and antisense strands comprise the nucleotide sequences set forth in SEQ ID NOs: 782 and 827, respectively. In some aspects, the disclosure provides an RNAi oligonucleotide wherein the sense and antisense strands comprise the nucleotide sequences set forth in SEQ ID NOs: 785 and 830, respectively. In some aspects, the disclosure provides an RNAi oligonucleotide wherein the sense and antisense strands comprise the nucleotide sequences set forth in SEQ ID NOs: 804 and 849, respectively.

[0264] In some aspects, the present disclosure provides a method for treating a subject having a disease, disorder or condition associated with KHK expression, the method comprising administering to the subject a therapeutically effective amount of an RNAi oligonucleotide comprising a sense strand and an antisense strand, or a pharmaceutically acceptable salt thereof, wherein the sense strand and antisense strands are selected from the group consisting of:
[0265] (a) SEQ ID NOs: 805 and 850, respectively;
[0266] (b) SEQ ID NOs: 806 and 851, respectively;
[0267] (c) SEQ ID NOs: 807 and 852, respectively;
[0268] (d) SEQ ID NOs: 808 and 853, respectively;
[0269] (e) SEQ ID NOs: 809 and 854, respectively;
[0270] (f) SEQ ID NOs: 810 and 855, respectively;
[0271] (g) SEQ ID NOs: 811 and 856, respectively;
[0272] (h) SEQ ID NOs: 812 and 857, respectively;
[0273] (i) SEQ ID NOs: 813 and 858, respectively;
[0274] (j) SEQ ID NOs: 814 and 859, respectively;
[0275] (k) SEQ ID NOs: 815 and 860, respectively;
[0276] (l) SEQ ID NOs: 816 and 861, respectively;
[0277] (m) SEQ ID NOs: 817 and 862, respectively and;
[0278] (n) SEQ ID NOs: 818 and 863, respectively.

[0279] In some aspects, the disclosure provides an RNAi oligonucleotide wherein the sense and antisense strands comprise the nucleotide sequences set forth in SEQ ID NOs: 805 and 850, respectively. In other aspects, the disclosure provides an RNAi oligonucleotide wherein the sense and antisense strands comprise the nucleotide sequences set forth in SEQ ID NOS: 809 and 854, respectively. In yet other aspects, the disclosure provides an RNAi oligonucleotide wherein the sense and antisense strands comprise the nucleotide sequences set forth in SEQ ID NOs: 810 and 855, respectively. In further aspects, the disclosure provides an RNAi oligonucleotide wherein the sense and antisense strands comprise the nucleotide sequences set forth in SEQ ID NOs: 812 and 857, respectively. In other aspects, the disclosure provides an RNAi oligonucleotide wherein the sense and antisense strands comprise the nucleotide sequences set forth in SEQ ID NOs: 815 and 860, respectively. In yet other aspects, the disclosure provides an RNAi oligonucleotide wherein the sense and antisense strands comprise the nucleotide sequences set forth in SEQ ID NOs: 818 and 863, respectively.

[0280] In any of the foregoing or related aspects, the disease, disorder, or condition associated with KHK expression is non-alcoholic fatty liver disease (NAFLD) and non-alcoholic steatohepatitis (NASH).

[0281] In any of the foregoing or related aspects, a RNAi oligonucleotide described herein is administered at a concentration of 0.01 mg/kg-5 mg/kg.

[0282] In some aspects, the disclosure provides use of any RNAi oligonucleotide or pharmaceutical composition described herein, in the manufacture of a medicament for the treatment of a disease, disorder or condition associated with KHK expression, optionally for the treatment of non-alcoholic fatty liver disease (NAFLD) and non-alcoholic steatohepatitis (NASH).

[0283] In some aspects, the disclosure provides any RNAi oligonucleotide or pharmaceutical composition described herein, for use, or adaptable for use, in the treatment of a disease, disorder or condition associated with KHK expression, optionally for the treatment of non-alcoholic fatty liver disease (NAFLD) and non-alcoholic steatohepatitis (NASH).

[0284] In some aspects, the disclosure provides a kit comprising any RNAi oligonucleotide described herein, an optional pharmaceutically acceptable carrier, and a package insert comprising instructions for administration to a subject having a disease, disorder or condition associated with KHK expression.

[0285] In some aspects, the disease, disorder, or condition associated with KHK expression is non-alcoholic fatty liver disease (NAFLD) and non-alcoholic steatohepatitis (NASH).

[0286] In some aspects, the disclosure provides an oligonucleotide for reducing KHK expression, the oligonucleotide comprising a nucleotide sequence of 15-50 nucleotides in length, wherein the nucleotide sequence comprises a region of complementarity to a KHK mRNA target sequence of any one of SEQ ID NOs: 4-387, and wherein the region of complementarity is at least 15 contiguous nucleotides in length, or a pharmaceutically acceptable salt thereof. In some aspects, the oligonucleotide is single stranded. In some aspects, the oligonucleotide is an antisense oligonucleotide. In some aspects, the nucleotide sequence is 15-30 nucleotides in length. In some aspects, the nucleotide sequence is 20-25 nucleotides in length. In some aspects, the nucleotide sequence is 22 nucleotides in length. In some aspects, the region of complementarity is 19 contiguous nucleotides in length. In some aspects, the region of complementarity is 20 contiguous nucleotides in length. In some aspects, the nucleotide sequence comprises at least one modification. In some aspects, the nucleotide sequence comprises a nucleotide sequence selected from the group consisting of SEQ ID NOs: 879-885 and 912-938. In some aspects, the nucleotide sequence comprises the nucleotide sequence set forth in SEQ ID NO: 920.

[0287] In other aspects, the nucleotide sequence comprises the nucleotide sequence set forth in SEQ ID NO: 923. In yet other aspects, the nucleotide sequence comprises the nucleotide sequence set forth in SEQ ID NO: 918. In further aspects, the nucleotide sequence comprises the nucleotide sequence set forth in SEQ ID NO: 917. In yet further aspects, the nucleotide sequence comprises the nucleotide sequence set forth in SEQ ID NO: 913. In yet further aspects, the nucleotide sequence comprises the nucleotide sequence set forth in SEQ ID NO: 936. In some aspects, the nucleotide sequence comprises the nucleotide sequence set forth in SEQ ID NO: 894. In other aspects, the nucleotide sequence comprises the nucleotide sequence set forth in SEQ ID NO: 897. In yet other aspects, the nucleotide sequence comprises the nucleotide sequence set forth in SEQ ID NO: 892. In further aspects, the nucleotide sequence comprises the nucleotide sequence set forth in SEQ ID NO: 891. In yet further aspects, the nucleotide sequence comprises the nucleotide sequence set forth in SEQ ID NO: 887. In yet further aspects, the nucleotide sequence comprises the nucleotide sequence set forth in SEQ ID NO: 909.

[0288] In some aspects, the disclosure provides a cell comprising an oligonucleotide described herein.

[0289] In some aspects, the disclosure provides a pharmaceutical composition comprising an oligonucleotide disclosed herein, or a pharmaceutically acceptable salt thereof, and at least one pharmaceutically acceptable carrier, delivery agent or excipient.

[0290] In some aspects, the disclosure provides a method for treating a subject having a disease, disorder or condition associated with KHK expression, the method comprising administering to the subject a therapeutically effective amount of an oligonucleotide or pharmaceutical composition described herein.

[0291] In some aspects, the disclosure provides a method of delivering an oligonucleotide to a subject, the method comprising administering a pharmaceutical composition described herein to the subject.

[0292] In some aspects, the disclosure provides a method for reducing KHK expression in a cell, a population of cells or a subject, the method comprising the step of:
[0293] i. contacting the cell or the population of cells with an oligonucleotide or a pharmaceutical composition described herein; or
[0294] ii. administering to the subject an oligonucleotide or a pharmaceutical composition described herein. In some aspects, reducing KHK expression comprises reducing an amount or level of KHK mRNA, an amount or level of KHK protein, or both.

[0295] In any of the foregoing or related aspects, the subject has a disease, disorder or condition associated with KHK expression. In some aspects, the disease, disorder, or condition associated with KHK expression is non-alcoholic fatty liver disease (NAFLD) and non-alcoholic steatohepatitis (NASH).

[0296] In any of the foregoing or related aspects, the oligonucleotide, or pharmaceutical composition, is administered in combination with a second composition or therapeutic agent.

[0297] In some aspects, the disclosure provides use of an oligonucleotide or pharmaceutical composition described herein, in the manufacture of a medicament for the treatment of a disease, disorder or condition associated with KHK expression, optionally for the treatment of non-alcoholic fatty liver disease (NAFLD) and non-alcoholic steatohepatitis (NASH). In other aspects, the disclosure provides an oligonucleotide or pharmaceutical composition described herein for use, or adaptable for use, in the treatment of a disease, disorder or condition associated with KHK expression, optionally for the treatment of non-alcoholic fatty liver disease (NAFLD) and non-alcoholic steatohepatitis (NASH).

[0298] In some aspects, the disclosure provides a kit comprising an oligonucleotide described herein, an optional pharmaceutically acceptable carrier, and a package insert comprising instructions for administration to a subject having a disease, disorder or condition associated with KHK expression.

[0299] In any of the foregoing or related aspects, the disease, disorder, or condition associated with KHK expression is non-alcoholic fatty liver disease (NAFLD) and non-alcoholic steatohepatitis (NASH).

[0300] In some aspects, the disclosure provides a double stranded ribonucleic acid (dsRNA) agent for inhibiting expression of KHK, wherein the dsRNA agent comprises a sense strand and an antisense strand forming a duplex region, wherein the sense strand comprises at least 15 contiguous nucleotides differing by no more than 3 nucleotides from a nucleotide sequence selected from SEQ ID NOs: 4-387, and the antisense strand comprises at least 15 contiguous nucleotides differing by no more than 3 nucleotides from a nucleotide sequence selected from SEQ ID NOs: 388-771.

[0301] In some aspects, the disclosure provides a double stranded ribonucleic acid (dsRNA) agent for inhibiting expression of KHK, wherein the dsRNA agent comprises a sense strand and an antisense strand forming a duplex region, wherein the sense strand comprises at least 15 contiguous nucleotides differing by no more than 3 nucleotides from a nucleotide sequence selected from SEQ ID NOs: 872-878 and 886-911, and the antisense strand comprises at least 15 contiguous nucleotides differing by no more than 3 nucleotides from a nucleotide sequence selected from SEQ ID NOs: 879-885 and 912-938.

### BRIEF DESCRIPTION OF THE DRAWINGS

[0302] FIG. 1 provides a graph depicting the percent (%) mRNA remaining in Hep3B cells (expressing endogenous human KHK) after 24-hour treatment with 1 nM of DsiRNA targeting various regions of the KHK gene. 384 DsiRNAs were designed and screened. Three primer pairs were used that recognized the KHK-A isoform (KHK-F763, NM_000221.2), KHK-C (KHK-825, NM_006488.3) and KHK-All (both isoforms) (KHK-F495, KHK-F1026, NM_006488.3). Expression was normalized between samples using HPRT and SFRS9 housekeeping genes.

[0303] FIG. 2A and FIG. 2B provide schematics of the Low-2′-Fluoro modification pattern (Low-2′-Fluoro (3PS) and Low-2′-Fluoro (2PS), respectively) applied to KHK mRNA targeting sequences to generate GalNAc-KHK constructs. The sense strand includes a tetraloop structure of nucleotides 26-31 of the 36-nucleotide strand. The anti-sense strand is complementary and includes a 2-nucleotide overhang.

[0304] FIG. 3 provides a graph depicting the percent (%) remaining KHK mRNA in KHK-A and KHK-C HDI (hydrodynamic injection) mice treated with human/non-human primate (NHP)-conserved GalNAc-KHK constructs. 3 days after subcutaneous dosing of 2 mg/kg of GalNAc-KHK constructs formulated in PBS, plasmids encoding either KHK-A and KHK-C were injected into mice via HDI and the percent (%) of KHK mRNA was measured 1 day later in liver samples relative to mice treated with PBS. mRNA was measured from livers using primers recognizing KHK-All (up-right triangle), KHK-C(upside-down triangle), and KHK-A (hexagon). The notation “Hs, 1 mm Mf” represents a human specific sequence that is one base mismatch different from monkey sequence.

[0305] FIG. 4A provides a schematic of the Med-2′-Fluoro modification pattern applied to KHK targeting sequence to generate GalNAc-KHK constructs. The sense strand includes a tetraloop structure of nucleotides 26-31 of the 36-nucleotide strand. The anti-sense strand is complementary and includes a 2-nucleotide overhang.

[0306] FIGS. 4B-4C provide graphs depicting the percent (%) KHK mRNA remaining after treating mice with GalNAc-KHK constructs having the Med-2′-Fluoro modification pattern. 3 days after subcutaneous dosing of 2 mg/kg of GalNAc-KHK constructs formulated in PBS, plasmid encoding KHK-C was injected into mice via HDI and the percent (%) of KHK mRNA was measured 1 day later in liver samples relative to mice treated with PBS. mRNA was measured using primers identifying both KHK-A and KHK—C isoform s (i.e., KHK-All) (FIG. 4B) and primers identifying only the KHK-C isoform (FIG. 4C). Multiple GalNAc-KHK-constructs were combined in a “mixed” group at 2 mg/kg for a total 10 mg/kg treatment (KHK-0861,-0865,-0882,-0883,-0885) as a positive knock-down control. The notation “Hs, 1 mm Mf” and the like represents a human specific sequence that is one base mismatch different from monkey sequence.

[0307] FIG. 4D provides a graph depicting the percent (%) KHK mRNA remaining after treating mice with different GalNAc-KHK constructs having the Med-2′-Fluoro modification pattern. 3 days after subcutaneous dosing of 2 mg/kg of GalNAc-KHK constructs formulated in PBS, plasmids encoding KHK-C were injected into mice via HDI and the percent (%) of KHK mRNA was measured 1 day later in liver samples relative to mice treated with PBS. mRNA was measured using primers (MmKHK-ALL-5-6, Forward: GCTCTTCCAGTTGTTTAGCTATGGT (SEQ ID NO: 939), Reverse: CAGGTGCTTGGCCACATCTT (SEQ ID NO:940), Probe: AGGTGGTGTTTGTCAGC (SEQ ID NO: 941)) identifying only mouse KHK. Remaining mRNA was normalized to a PBS control. Multiple GalNAc-KHK constructs were combined in a “mixed” group as a positive knock-down control.

[0308] FIG. 4E provides a graph depicting the difference in percent (%) KHK mRNA remaining after treatment with GalNAc-KHK constructs with different modification patterns (Low-2′F (FIG. 2A and FIG. 2B) and Med-2′F (FIG. 4A)). Remaining mRNA was normalized to a PBS control. Multiple GalNAc-KHK constructs were combined in a “mixed” group as a positive knock-down control.

[0309] FIG. 5 provides a graph depicting the difference in percent (%) KHK mRNA remaining after treating mice with GalNAc-KHK constructs. 3 days after subcutaneous dosing of 2 mg/kg of GalNAc-KHK constructs formulated in PBS, plasmid encoding KHK-C(NM_006488) (pCMV6-KHK-C, Cat #: RC223488, OriGene) was injected into mice via HDI and the percent (%) of KHK mRNA remaining was measured 1 day later in liver samples relative to mice treated with PBS. Results include mRNA measured from primers for KHK-All (up-right triangle), and KHK-C(upside-down triangle). Grey arrow shows 30 mg/kg treatment of KHK-885 has more than 98% knockdown.

[0310] FIGS. 6A-6B provide graphs depicting the percent (%) KHK mRNA remaining after treating KHK-C plasmid HDI mice (as described in FIG. 5) with different GalNAc-KHK constructs. mRNA was measured using primers identifying both KHK-A and KHK—C isoforms (KHK-AII; FIG. 6A) and primers identifying only the KHK-C isoform (FIG. 6B).

[0311] FIG. 6C provides a graph depicting the percent (%) KHK mRNA remaining in the liver after treating KHK-C plasmid HDI mice (as described in FIG. 5) with different GalNAc-KHK constructs. mRNA was measured using primers identifying only mouse KHK.

[0312] FIGS. 7A-7C provide graphs depicting the percent (%) KHK mRNA remaining in liver biopsies from non-human primates (NHP) 28 days (FIG. 7A), 56 days (FIG. 7B), and 84 days (FIG. 7C) after a single dose of specified GalNAc-constructs. NHP were subcutaneously injected with 6 mg/kg of GalNAc-KHK on Study Day 0. The percent indicated is the average reduction in KHK-mRNA compared to a PBS control.

[0313] FIG. 7D provides a line graph demonstrating the changes in KHK mRNA in liver biopsies taken at various time points from NHP (as treated in FIGS. 7A-7C) after a single dose of GalNAc-KHK constructs.

[0314] FIGS. 8A-8C provide graphs depicting the percent (%) KHK protein remaining in liver biopsies from non-human primates (NHP) 28 days (FIG. 8A), 56 days (FIG. 8B), and 84 days (FIG. 8C) after treatment. NHP were treated as in FIGS. 7A-7C. The percent indicated is the average reduction in KHK-protein compared to a PBS control.

[0315] FIG. 8D provides a line graph demonstrating the changes in KHK protein in liver biopsies taken at various time points from NHP (as treated in FIGS. 7A-7C) after a single dose of GalNAc-KHK constructs.

[0316] FIGS. 9A-9C provide correlation graphs demonstrating the relationship between remaining KHK mRNA expression and remaining KHK protein expression in liver biopsies from NHP treated with a single dose of GalNAc-KHK constructs. Correlation among all constructs is compared at days 28 (FIG. 9A), 56 (FIG. 9B), and 84 (FIG. 9C) after dosing. Individual dots represent individual biopsies.

[0317] FIG. 10A continuing to FIG. 10B depict a dsRNAi oligonucleotide of the invention comprising a sense strand comprising SEQ ID NO: 775 and an antisense strand comprising SEQ ID NO: 820, wherein said dsRNA is in the form of a conjugate.

[0318] FIG. 11A continuing to FIG. 11B depict a dsRNAi oligonucleotide of the invention comprising a sense strand comprising SEQ ID NO: 779 and an antisense strand comprising SEQ ID NO: 824, wherein said dsRNA is in the form of a conjugate.

[0319] FIG. 12A continuing to FIG. 12B depict a dsRNAi oligonucleotide of the invention comprising a sense strand comprising SEQ ID NO: 780 and an antisense strand comprising SEQ ID NO: 825, wherein said dsRNA is in the form of a conjugate.

[0320] FIG. 13A continuing to FIG. 13B depict a dsRNAi oligonucleotide of the invention comprising a sense strand comprising SEQ ID NO: 782 and an antisense strand comprising SEQ ID NO: 827, wherein said dsRNA is in the form of a conjugate.

[0321] FIG. 14A continuing to FIG. 14B depict a dsRNAi oligonucleotide of the invention comprising a sense strand comprising SEQ ID NO: 785 and an antisense strand comprising SEQ ID NO: 830, wherein said dsRNA is in the form of a conjugate.

[0322] FIG. 15A continuing to FIG. 15B depict a dsRNAi oligonucleotide of the invention comprising a sense strand comprising SEQ ID NO: 804 and an antisense strand comprising SEQ ID NO: 849, wherein said dsRNA is in the form of a conjugate.

### DETAILED DESCRIPTION OF THE INVENTION

[0323] According to some aspects, the disclosure provides oligonucleotides that reduce KHK expression in the liver. In some embodiments, the oligonucleotides provided herein are useful to treat diseases associated with KHK expression in the liver. In some respects, the disclosure provides methods of treating a disease associated with KHK expression by reducing KHK gene expression in cells (e.g., cells of the liver).

### Oligonucleotide Inhibitors of KHK Expression

### Ketohexokinase (KHK) Target Sequences

[0324] In some embodiments, the disclosure provides an oligonucleotide which is targeted to a target sequence comprising a ketohexokinase (KHK) mRNA. In some embodiments, the oligonucleotide, or a portion, fragment, or strand thereof (e.g., an antisense strand or a guide strand of a dsRNA) binds or anneals to a target sequence comprising a KHK mRNA, thereby inhibiting KHK expression. In some embodiments, the oligonucleotide is targeted to a target sequence comprising a KHK-A isoform mRNA. In some embodiments, the oligonucleotide is targeted to a target sequence comprising a KHK-C isoform mRNA. In some embodiments, the oligonucleotide is targeted to a KHK target sequence for the purpose of inhibiting KHK expression in vivo. In some embodiments, the amount or extent of inhibition of KHK expression by an oligonucleotide targeted to a KHK target sequence correlates with the potency of the oligonucleotide. In some embodiments, the amount or extent of inhibition of KHK expression by an oligonucleotide targeted to a KHK target sequence correlates with the amount or extent of therapeutic benefit in a subject or patient having a disease, disorder or condition associated with the expression of KHK treated with the oligonucleotide.

[0325] Through examination of the nucleotide sequence of mRNAs encoding KHK, including mRNAs of multiple different species (e.g., human, cynomolgus monkey, mouse, and rat; see, e.g., Example 2) and as a result of in vitro and in vivo testing (see, e.g., Examples 2-6), it has been discovered that certain nucleotide sequences of KHK mRNA are more amenable than others to oligonucleotide-based inhibition and are thus useful as target sequences for the oligonucleotides herein. In some embodiments, a sense strand of an oligonucleotide (e.g., a dsRNA) described herein comprises a KHK target sequence. In some embodiments, a portion or region of the sense strand of a dsRNA described herein comprises a KHK target sequence. In some embodiments, a KHK target sequence comprises, or consists of, a sequence of any one of SEQ ID Nos: 4-387. In some embodiments, a KHK target sequence comprises, or consists of, nucleotides 1-19 of any one of SEQ ID Nos: 4-387. In some embodiments, a KHK target sequence comprises, or consists of, the sequence set forth in SEQ ID No: 39. In some embodiments, a KHK target sequence comprises, or consists of, nucleotides 1-19 of the sequence set forth in SEQ ID No: 39. In some embodiments, a KHK target sequence comprises, or consists of, the sequence set forth in SEQ ID No: 102. In some embodiments, a KHK target sequence comprises, or consists of, nucleotides 1-19 of the sequence set forth in SEQ ID No: 102. In some embodiments, a KHK target sequence comprises, or consists of, the sequence set forth in SEQ ID No: 104. In some embodiments, a KHK target sequence comprises, or consists of, nucleotides 1-19 of the sequence set forth in SEQ ID No: 104. In some embodiments, a KHK target sequence comprises, or consists of, the sequence set forth in SEQ ID No: 107. In some embodiments, a KHK target sequence comprises, or consists of, nucleotides 1-19 of the sequence set forth in SEQ ID No: 107. In some embodiments, a KHK target sequence comprises, or consists of, the sequence set forth in SEQ ID No: 191. In some embodiments, a KHK target sequence comprises, or consists of, nucleotides 1-19 of the sequence set forth in SEQ ID No: 191. In some embodiments, a KHK target sequence comprises, or consists of, the sequence set forth in SEQ ID No: 269. In some embodiments, a KHK target sequence comprises, or consists of, nucleotides 1-19 of the sequence set forth in SEQ ID No: 269.

### KHK Targeting Sequences

[0326] In some embodiments, the oligonucleotides herein have regions of complementarity to KHK mRNA (e.g., within a target sequence of KHK mRNA) for purposes of targeting the mRNA in cells and inhibiting its expression. In some embodiments, the oligonucleotides herein comprise a KHK targeting sequence (e.g., an antisense strand or a guide strand of a dsRNA) having a region of complementarity that binds or anneals to a KHK target sequence by complementary (Watson-Crick) base pairing. The targeting sequence or region of complementarity is generally of a suitable length and base content to enable binding or annealing of the oligonucleotide (or a strand thereof) to a KHK mRNA for purposes of inhibiting its expression. In some embodiments, the targeting sequence or region of complementarity is at least about 12, at least about 13, at least about 14, at least about 15, at least about 16, at least about 17, at least about 18, at least about 19, at least about 20, at least about 21, at least about 22, at least about 23, at least about 24, at least about 25, at least about 26, at least about 27, at least about 28, at least about 29 or at least about 30 nucleotides in length. In some embodiments, the targeting sequence or region of complementarity is about 12 to about 30 (e.g., 12 to 30, 12 to 22, 15 to 25, 17 to 21, 18 to 27, 19 to 27, or 15 to 30) nucleotides in length. In some embodiments, the targeting sequence or region of complementarity is about 12, 13, 14, 15, 16, 17, 18, 19, 20, 21, 22, 23, 24, 25, 26, 27, 28, 29 or 30 nucleotides in length. In some embodiments, the targeting sequence or region of complementarity is 18 nucleotides in length. In some embodiments, the targeting sequence or region of complementarity is 19 nucleotides in length. In some embodiments, the targeting sequence or region of complementarity is 20 nucleotides in length. In some embodiments, the targeting sequence or region of complementarity is 21 nucleotides in length. In some embodiments, the targeting sequence or region of complementarity is 22 nucleotides in length. In some embodiments, the targeting sequence or region of complementarity is 23 nucleotides in length. In some embodiments, the targeting sequence or region of complementarity is 24 nucleotides in length. In some embodiments, an oligonucleotide comprises a target sequence or region of complementarity complementary to a sequence of any one of SEQ ID NOs: 4-387, and the targeting sequence or region of complementarity is 18 nucleotides in length. In some embodiments, an oligonucleotide comprises a target sequence or region of complementarity complementary to a sequence of any one of SEQ ID NOs: 4-387, and the targeting sequence or region of complementarity is 19 nucleotides in length. In some embodiments, an oligonucleotide comprises a target sequence or region of complementarity complementary to a sequence of any one of SEQ ID NOs: 4-387, and the targeting sequence or region of complementarity is 20 nucleotides in length. In some embodiments, an oligonucleotide comprises a target sequence or region of complementarity complementary to a sequence of any one of SEQ ID NOs: 4-387, and the targeting sequence or region of complementarity is 21 nucleotides in length. In some embodiments, an oligonucleotide comprises a target sequence or region of complementarity complementary to a sequence of any one of SEQ ID NOs: 4-387, and the targeting sequence or region of complementarity is 22 nucleotides in length. In some embodiments, an oligonucleotide comprises a target sequence or region of complementarity complementary to a sequence of any one of SEQ ID NOs: 4-387, and the targeting sequence or region of complementarity is 23 nucleotides in length. In some embodiments, an oligonucleotide comprises a target sequence or region of complementarity complementary to a sequence of any one of SEQ ID NOs: 4-387, and the targeting sequence or region of complementarity is 24 nucleotides in length.

[0327] In some embodiments, an oligonucleotide herein comprises a targeting sequence or a region of complementarity (e.g., an antisense strand or a guide strand of a double-stranded oligonucleotide) that is fully complementary to a KHK target sequence. In some embodiments, the targeting sequence or region of complementarity is partially complementary to a KHK target sequence. In some embodiments, the targeting sequence or region of complementarity has up to 3 nucleotide mismatches to a KHK target sequence. In some embodiments, the oligonucleotide comprises a targeting sequence or region of complementarity that is fully complementary to a sequence of KHK. In some embodiments, the oligonucleotide comprises a targeting sequence or region of complementarity that is partially complementary to a sequence of KHK. In some embodiments, the oligonucleotide comprises a targeting sequence or region of complementarity that is fully complementary to a sequence of any one of SEQ ID NOs: 4-387. In some embodiments, the oligonucleotide comprises a targeting sequence or region of complementarity that is partially complementary to a sequence of KHK. In some embodiments, the oligonucleotide comprises a targeting sequence or region of complementarity that is fully complementary to nucleotides 1-19 of a sequence of any one of SEQ ID NOs: 4-387. In some embodiments, the oligonucleotide comprises a targeting sequence or region of complementarity that is fully complementary to the sequence set forth in SEQ ID NO: 39. In some embodiments, the oligonucleotide comprises a targeting sequence or region of complementarity that is fully complementary to nucleotides 1-19 of the sequence set forth in SEQ ID NO: 39. In some embodiments, the oligonucleotide comprises a targeting sequence or region of complementarity that is fully complementary to the sequence set forth in SEQ ID NO: 102. In some embodiments, the oligonucleotide comprises a targeting sequence or region of complementarity that is fully complementary to nucleotides 1-19 of the sequence set forth in SEQ ID NO: 102. In some embodiments, the oligonucleotide comprises a targeting sequence or region of complementarity that is fully complementary to the sequence set forth in SEQ ID NO: 104. In some embodiments, the oligonucleotide comprises a targeting sequence or region of complementarity that is fully complementary to nucleotides 1-19 of the sequence set forth in SEQ ID NO: 104. In some embodiments, the oligonucleotide comprises a targeting sequence or region of complementarity that is fully complementary to the sequence set forth in SEQ ID NO: 107. In some embodiments, the oligonucleotide comprises a targeting sequence or region of complementarity that is fully complementary to nucleotides 1-19 of the sequence set forth in SEQ ID NO: 107. In some embodiments, the oligonucleotide comprises a targeting sequence or region of complementarity that is fully complementary to the sequence set forth in SEQ ID NO: 191. In some embodiments, the oligonucleotide comprises a targeting sequence or region of complementarity that is fully complementary to nucleotides 1-19 of the sequence set forth in SEQ ID NO: 191. In some embodiments, the oligonucleotide comprises a targeting sequence or region of complementarity that is fully complementary to the sequence set forth in SEQ ID NO: 269. In some embodiments, the oligonucleotide comprises a targeting sequence or region of complementarity that is fully complementary to nucleotides 1-19 of the sequence set forth in SEQ ID NO: 269. In some embodiments, the oligonucleotide comprises a targeting sequence or region of complementarity that is partially complementary to a sequence of any one of SEQ ID NOs: 4-387. In some embodiments, the oligonucleotide comprises a targeting sequence or region of complementarity that is partially complementary to nucleotides 1-19 of a sequence of any one of SEQ ID NOs: 4-387. In some embodiments, the oligonucleotide comprises a targeting sequence or region of complementarity that is partially complementary to the sequence set forth in SEQ ID NO: 39. In some embodiments, the oligonucleotide comprises a targeting sequence or region of complementarity that is partially complementary to nucleotides 1-19 of the sequence set forth in SEQ ID NO: 39. In some embodiments, the oligonucleotide comprises a targeting sequence or region of complementarity that is partially complementary to the sequence set forth in SEQ ID NO: 102. In some embodiments, the oligonucleotide comprises a targeting sequence or region of complementarity that is partially complementary to nucleotides 1-19 of the sequence set forth in SEQ ID NO: 102. In some embodiments, the oligonucleotide comprises a targeting sequence or region of complementarity that is partially complementary to the sequence set forth in SEQ ID NO: 104. In some embodiments, the oligonucleotide comprises a targeting sequence or region of complementarity that is partially complementary to nucleotides 1-19 of the sequence set forth in SEQ ID NO: 104. In some embodiments, the oligonucleotide comprises a targeting sequence or region of complementarity that is partially complementary to the sequence set forth in SEQ ID NO: 107. In some embodiments, the oligonucleotide comprises a targeting sequence or region of complementarity that is partially complementary to nucleotides 1-19 of the sequence set forth in SEQ ID NO: 107. In some embodiments, the oligonucleotide comprises a targeting sequence or region of complementarity that is partially complementary to the sequence set forth in SEQ ID NO: 191. In some embodiments, the oligonucleotide comprises a targeting sequence or region of complementarity that is partially complementary to nucleotides 1-19 of the sequence set forth in SEQ ID NO: 191. In some embodiments, the oligonucleotide comprises a targeting sequence or region of complementarity that is partially complementary to the sequence set forth in SEQ ID NO: 269. In some embodiments, the oligonucleotide comprises a targeting sequence or region of complementarity that is partially complementary to nucleotides 1-19 of the sequence set forth in SEQ ID NO: 269. In some embodiments, the oligonucleotide comprises a targeting sequence or region of complementarity that is fully complementary to a sequence of any one of SEQ ID NOs: 872-878 and 886-911. In some embodiments, the oligonucleotide comprises a targeting sequence or region of complementarity that is partially complementary to a sequence of any one of SEQ ID NOs: 872-878 and 886-911. In some embodiments, the oligonucleotide comprises a targeting sequence or region of complementarity that is fully complementary to a sequence of any one of SEQ ID NOs: 887, 891, 892, 894, 897 and 909. In some embodiments, the oligonucleotide comprises a targeting sequence or region of complementarity that is partially complementary to a sequence of any one of SEQ ID NOs: 887, 891, 892, 894, 897 and 909.

[0328] In some embodiments, the oligonucleotide herein comprises a targeting sequence or region of complementarity that is complementary to a contiguous sequence of nucleotides comprising a KHK mRNA, wherein the contiguous sequence of nucleotides is about 12 to about 30 nucleotides in length (e.g., 12 to 30, 12 to 28, 12 to 26, 12 to 24, 12 to 20, 12 to 18, 12 to 16, 14 to 22, 16 to 20, 18 to 20 or 18 to 19 nucleotides in length). In some embodiments, the oligonucleotide comprises a targeting sequence or region of complementarity that is complementary to a contiguous sequence of nucleotides comprising a KHK mRNA, wherein the contiguous sequence of nucleotides is 10, 11, 12, 13, 14, 15, 16, 17, 18, 19 or 20 nucleotides in length. In some embodiments, the oligonucleotide comprises a targeting sequence or region of complementarity that is complementary to a contiguous sequence of nucleotides comprising a KHK mRNA, wherein the contiguous sequence of nucleotides is 19 nucleotides in length. In some embodiments, the oligonucleotide comprises a targeting sequence or region of complementarity that is complementary to a contiguous sequence of nucleotides comprising a KHK mRNA, wherein the contiguous sequence of nucleotides is 20 nucleotides in length. In some embodiments, the oligonucleotide comprises a targeting sequence or a region of complementarity that is complementary to a contiguous sequence of nucleotides of any one of SEQ ID NOs: 4-387, optionally wherein the contiguous sequence of nucleotides is 19 nucleotides in length. In some embodiments, the oligonucleotide comprises a targeting sequence or a region of complementarity that is complementary to a contiguous sequence of nucleotides of any one of SEQ ID NOs: 4-387, wherein the contiguous sequence of nucleotides is 19 nucleotides in length. In some embodiments, the oligonucleotide comprises a targeting sequence or a region of complementarity that is complementary to a contiguous sequence of nucleotides of any one of SEQ ID NOs: 4-387, wherein the contiguous sequence of nucleotides is 20 nucleotides in length. In some embodiments, the oligonucleotide comprises a targeting sequence or a region of complementarity that is complementary to a contiguous sequence of nucleotides of any one of SEQ ID NOs: 872-878 and 886-911, optionally wherein the contiguous sequence of nucleotides is 19 nucleotides in length. In some embodiments, the oligonucleotide comprises a targeting sequence or a region of complementarity that is complementary to a contiguous sequence of nucleotides of any one of SEQ ID NOs: 872-878 and 886-911, wherein the contiguous sequence of nucleotides is 19 nucleotides in length. In some embodiments, the oligonucleotide comprises a targeting sequence or a region of complementarity that is complementary to a contiguous sequence of nucleotides of any one of SEQ ID NOs: 872-878 and 886-911, wherein the contiguous sequence of nucleotides is 20 nucleotides in length. In some embodiments, the oligonucleotide comprises a targeting sequence or a region of complementarity that is complementary to a contiguous sequence of nucleotides of any one of SEQ ID NOs: 887, 891, 892, 894, 897, and 909, optionally wherein the contiguous sequence of nucleotides is 19 nucleotides in length. In some embodiments, the oligonucleotide comprises a targeting sequence or a region of complementarity that is complementary to a contiguous sequence of nucleotides of any one of SEQ ID NOs: 887, 891, 892, 894, 897, and 909, wherein the contiguous sequence of nucleotides is 19 nucleotides in length. In some embodiments, the oligonucleotide comprises a targeting sequence or a region of complementarity that is complementary to a contiguous sequence of nucleotides of any one of SEQ ID NOs: 887, 891, 892, 894, 897, and 909, wherein the contiguous sequence of nucleotides is 20 nucleotides in length.

[0329] In some embodiments, a targeting sequence or region of complementarity of an oligonucleotide is provided that is complementary to contiguous nucleotides of a sequence as set forth in any one of SEQ ID NOs: 4-387 and spans the entire length of an antisense strand. In some embodiments, a targeting sequence or region of complementarity of an oligonucleotide is provided that is complementary to contiguous nucleotides of nucleotides 1-19 a sequence as set forth in any one of SEQ ID NOs: 4-387 and spans the entire length of an antisense strand. In some embodiments, a region of complementarity of an oligonucleotide is provided that is complementary to contiguous nucleotides of a sequence as set forth in any one of SEQ ID NOs: 4-387 and spans a portion of the entire length of an antisense strand. In some embodiments, a region of complementarity of an oligonucleotide is provided that is complementary to contiguous nucleotides of nucleotides 1-19 a sequence as set forth in any one of SEQ ID NOs: 4-387 and spans a portion of the entire length of an antisense strand. In some embodiments, an oligonucleotide herein comprises a region of complementarity (e.g., on an antisense strand of a dsRNA) that is at least partially (e.g., fully) complementary to a contiguous stretch of nucleotides spanning nucleotides 1-19 of a sequence as set forth in any one of SEQ ID NOs: 4-387. In some embodiments, an oligonucleotide herein comprises a region of complementarity (e.g., on an antisense strand of a dsRNA) that is at least partially (e.g., fully) complementary to a contiguous stretch of nucleotides spanning nucleotides 1-20 of a sequence as set forth in any one of SEQ ID NOs: 4-387. In some embodiments, a targeting sequence or region of complementarity of an oligonucleotide is provided that is complementary to contiguous nucleotides of a sequence as set forth in any one of SEQ ID NOs: 872-878 and 886-911 and spans the entire length of an antisense strand. In some embodiments, a region of complementarity of an oligonucleotide that is complementary to contiguous nucleotides of a sequence as set forth in any one of SEQ ID NOs: 872-878 and 886-911 and spans a portion of the entire length of an antisense strand. In some embodiments, an oligonucleotide herein comprises a region of complementarity (e.g., on an antisense strand of a dsRNA) that is at least partially (e.g., fully) complementary to a contiguous stretch of nucleotides spanning nucleotides 1-19 of a sequence as set forth in any one of SEQ ID NOs: 872-878 and 886-911. In some embodiments, an oligonucleotide herein comprises a region of complementarity (e.g., on an antisense strand of a dsRNA) that is at least partially (e.g., fully) complementary to a contiguous stretch of nucleotides spanning nucleotides 1-20 of a sequence as set forth in any one of SEQ ID NOs: 872-878 and 886-911. In some embodiments, a targeting sequence or region of complementarity of an oligonucleotide is provided that is complementary to contiguous nucleotides of a sequence as set forth in any one of SEQ ID NOs: 887, 891, 892, 894, 897, and 909 and spans the entire length of an antisense strand. In some embodiments, a region of complementarity of an oligonucleotide is provided that is complementary to contiguous nucleotides of a sequence as set forth in any one of SEQ ID NOs: 887, 891, 892, 894, 897, and 909 and spans a portion of the entire length of an antisense strand. In some embodiments, an oligonucleotide herein comprises a region of complementarity (e.g., on an antisense strand of a dsRNA) that is at least partially (e.g., fully) complementary to a contiguous stretch of nucleotides spanning nucleotides 1-19 of a sequence as set forth in any one of SEQ ID NOs: 887, 891, 892, 894, 897, and 909. In some embodiments, an oligonucleotide herein comprises a region of complementarity (e.g., on an antisense strand of a dsRNA) that is at least partially (e.g., fully) complementary to a contiguous stretch of nucleotides spanning nucleotides 1-20 of a sequence as set forth in any one of SEQ ID NOs: 887, 891, 892, 894, 897, and 909.

[0330] In some embodiments, an oligonucleotide herein comprises a targeting sequence or region of complementarity having one or more base pair (bp) mismatches with the corresponding KHK target sequence. In some embodiments, the targeting sequence or region of complementarity may have up to about 1, up to about 2, up to about 3, up to about 4, up to about 5, etc. mismatches with the corresponding KHK target sequence provided that the ability of the targeting sequence or region of complementarity to bind or anneal to the KHK mRNA under appropriate hybridization conditions and/or the ability of the oligonucleotide to inhibit KHK expression is maintained. Alternatively, the targeting sequence or region of complementarity may have no more than 1, no more than 2, no more than 3, no more than 4, or no more than 5 mismatches with the corresponding KHK target sequence provided that the ability of the targeting sequence or region of complementarity to bind or anneal to the KHK mRNA under appropriate hybridization conditions and/or the ability of the oligonucleotide to inhibit KHK expression is maintained. In some embodiments, the oligonucleotide comprises a targeting sequence or region of complementarity having 1 mismatch with the corresponding target sequence. In some embodiments, the oligonucleotide comprises a targeting sequence or region of complementarity having 2 mismatches with the corresponding target sequence. In some embodiments, the oligonucleotide comprises a targeting sequence or region of complementarity having 3 mismatches with the corresponding target sequence. In some embodiments, the oligonucleotide comprises a targeting sequence or region of complementarity having 4 mismatches with the corresponding target sequence. In some embodiments, the oligonucleotide comprises a targeting sequence or region of complementarity having 5 mismatches with the corresponding target sequence. In some embodiments, the oligonucleotide comprises a targeting sequence or region of complementarity having more than one mismatch (e.g., 2, 3, 4, 5 or more mismatches) with the corresponding target sequence, wherein at least 2 (e.g., all) of the mismatches are positioned consecutively (e.g., 2, 3, 4, 5 or more mismatches in a row), or wherein the mismatches are interspersed throughout the targeting sequence or region of complementarity. In some embodiments, the oligonucleotide comprises a targeting sequence or region of complementarity having more than one mismatch (e.g., 2, 3, 4, 5 or more mismatches) with the corresponding target sequence, wherein at least 2 (e.g., all) of the mismatches are positioned consecutively (e.g., 2, 3, 4, 5 or more mismatches in a row), or wherein at least one or more non-mismatched base pair is located between the mismatches, or a combination thereof. In some embodiments, the oligonucleotide comprises a targeting sequence or a region of complementarity that is complementary to a contiguous sequence of nucleotides of any one of SEQ ID NOs: 4-387, wherein the targeting sequence or region of complementarity may have up to about 1, up to about 2, up to about 3, up to about 4, up to about 5, etc. mismatches with the corresponding KHK target sequence. In some embodiments, the oligonucleotide comprises a targeting sequence or a region of complementarity that is complementary to a contiguous sequence of nucleotides of nucleotides 1-19 of any one of SEQ ID NOs: 4-387, wherein the targeting sequence or region of complementarity may have up to about 1, up to about 2, up to about 3, up to about 4, up to about 5, etc. mismatches with the corresponding KHK target sequence. In some embodiments, the oligonucleotide comprises a targeting sequence or a region of complementarity that is complementary to a contiguous sequence of nucleotides of any one of SEQ ID NOs: 4-387, wherein the targeting sequence or region of complementarity may have no more than 1, no more than 2, no more than 3, no more than 4, or no more than 5 mismatches with the corresponding KHK target sequence. In some embodiments, the oligonucleotide comprises a targeting sequence or a region of complementarity that is complementary to a contiguous sequence of nucleotides of nucleotides 1-19 of any one of SEQ ID NOs: 4-387, wherein the targeting sequence or region of complementarity may have no more than 1, no more than 2, no more than 3, no more than 4, or no more than 5 mismatches with the corresponding KHK target sequence. In some embodiments, the oligonucleotide comprises a targeting sequence or a region of complementarity that is complementary to a contiguous sequence of nucleotides of any one of SEQ ID NOs: 872-878 and 886-911, wherein the targeting sequence or region of complementarity may have up to about 1, up to about 2, up to about 3, up to about 4, up to about 5, etc. mismatches with the corresponding KHK target sequence. In some embodiments, the oligonucleotide comprises a targeting sequence or a region of complementarity that is complementary to a contiguous sequence of nucleotides of any one of SEQ ID NOs: 872-878 and 886-911, wherein the targeting sequence or region of complementarity may have no more than 1, no more than 2, no more than 3, no more than 4, or no more than 5 mismatches with the corresponding KHK target sequence. In some embodiments, the oligonucleotide comprises a targeting sequence or a region of complementarity that is complementary to a contiguous sequence of nucleotides of any one of SEQ ID NOs: 887, 891, 892, 894, 897, and 909, wherein the targeting sequence or region of complementarity may have up to about 1, up to about 2, up to about 3, up to about 4, up to about 5, etc. mismatches with the corresponding KHK target sequence. In some embodiments, the oligonucleotide comprises a targeting sequence or a region of complementarity that is complementary to a contiguous sequence of nucleotides of any one of SEQ ID NOs: 887, 891, 892, 894, 897, and 909, wherein the targeting sequence or region of complementarity may have no more than 1, no more than 2, no more than 3, no more than 4, or no more than 5 mismatches with the corresponding KHK target sequence.

### Types of Oligonucleotides

[0331] A variety of oligonucleotide types and/or structures are useful for targeting KHK in the methods herein including, but not limited to, RNAi oligonucleotides, antisense oligonucleotides, miRNAs, etc. Any of the oligonucleotide types described herein or elsewhere are contemplated for use as a framework to incorporate a KHK targeting sequence herein for the purposes of inhibiting KHK expression.

[0332] In some embodiments, the oligonucleotides herein inhibit KHK expression by engaging with RNA interference (RNAi) pathways upstream or downstream of Dicer involvement. For example, RNAi oligonucleotides have been developed with each strand having sizes of about 19-25 nucleotides with at least one 3′ overhang of 1 to 5 nucleotides (see, e.g., U.S. Pat. No. 8,372,968). Longer oligonucleotides also have been developed that are processed by Dicer to generate active RNAi products (see, e.g., U.S. Pat. No. 8,883,996). Further work produced extended dsRNAs where at least one end of at least one strand is extended beyond a duplex targeting region, including structures where one of the strands includes a thermodynamically stabilizing tetraloop structure (see, e.g., U.S. Pat. Nos. 8,513,207 and 8,927,705, as well as Intl. Patent Application Publication No. WO 2010/033225). Such structures may include single-stranded (ss) extensions (on one or both sides of the molecule) as well as double-stranded (ds) extensions.

[0333] In some embodiments, the oligonucleotides herein engage with the RNAi pathway downstream of the involvement of Dicer (e.g., Dicer cleavage). In some embodiments, the oligonucleotides described herein are Dicer substrates. In some embodiments, upon endogenous Dicer processing, double-stranded nucleic acids of 19-23 nucleotides in length capable of reducing KHK expression are produced. In some embodiments, the oligonucleotide has an overhang (e.g., of 1, 2, or 3 nucleotides in length) in the 3′ end of the sense strand. In some embodiments, the oligonucleotide has an overhang (e.g., of 1, 2, or 3 nucleotides in length) in the 3′ end of the antisense strand. In some embodiments, the oligonucleotide (e.g., siRNA) comprises a 21-nucleotide guide strand that is antisense to a target RNA and a complementary passenger strand, in which both strands anneal to form a 19-bp duplex and 2 nucleotide overhangs at either or both 3′ ends. Longer oligonucleotide designs also are available including oligonucleotides having a guide strand of 23 nucleotides and a passenger strand of 21 nucleotides, where there is a blunt end on the right side of the molecule (3′ end of passenger strand/5′ end of guide strand) and a two nucleotide 3′-guide strand overhang on the left side of the molecule (5′ end of the passenger strand/3′ end of the guide strand). In such molecules, there is a 21 bp duplex region. See, e.g., U.S. Pat. Nos. 9,012,138; 9,012,621 and 9,193,753.

[0334] In some embodiments, the oligonucleotides herein comprise sense and antisense strands that are both in the range of about 17 to 36 (e.g., 17 to 36, 20 to 25 or 21-23) nucleotides in length. In some embodiments, the oligonucleotides described herein comprise an antisense strand of 19-30 nucleotides in length and a sense strand of 19-50 nucleotides in length, wherein the antisense and sense strands are separate strands which form an asymmetric duplex region having an overhang of 1-4 nucleotides at the 3′ terminus of the antisense strand. In some embodiments, an oligonucleotide herein comprises a sense and antisense strand that are both in the range of about 19-22 nucleotides in length. In some embodiments, the sense and antisense strands are of equal length. In some embodiments, an oligonucleotide comprises sense and antisense strands, such that there is a 3′-overhang on either the sense strand or the antisense strand, or both the sense and antisense strand. In some embodiments, for oligonucleotides that have sense and antisense strands that are both in the range of about 21-23 nucleotides in length, a 3′ overhang on the sense, antisense, or both sense and antisense strands is 1 or 2 nucleotides in length. In some embodiments, the oligonucleotide has a guide strand of 22 nucleotides and a passenger strand of 20 nucleotides, where there is a blunt end on the right side of the molecule (3′ end of passenger strand/5′ end of guide strand) and a 2 nucleotide 3′-guide strand overhang on the left side of the molecule (5′ end of the passenger strand/3′ end of the guide strand). In such molecules, there is a 20 bp duplex region.

[0335] Other oligonucleotide designs for use with the compositions and methods herein include: 16-mer siRNAs (see, e.g., NUCLEIC ACIDS IN CHEMISTRY AND BIOLOGY. Blackburn (ed.), Royal Society of Chemistry, 2006), shRNAs (e.g., having 19 bp or shorter stems; see, e.g., Moore et al. (2010) METHODS MOL. BIOL. 629:139-156), blunt siRNAs (e.g., of 19 bps in length; see, e.g., Kraynack & Baker (2006) RNA 12:163-176), asymmetrical siRNAs (aiRNA; see, e.g., Sun et al. (2008) NAT. BIOTECHNOL. 26:1379-1382), asymmetric shorter-duplex siRNA (see, e.g., Chang et al. (2009) MOL. THER. 17:725-32), fork siRNAs (see, e.g., Hohjoh (2004) FEBS LETT. 557:193-198), ss siRNAs (Elsner (2012) NAT. BIOTECHNOL. 30:1063), dumbbell-shaped circular siRNAs (see, e.g., Abe et al. (2007) J. AM. CHEM. SOC. 129:15108-09), and small internally segmented interfering RNA (siRNA; see, e.g., Bramsen et al. (2007) NUCLEIC ACIDS RES. 35:5886-97). Further non-limiting examples of an oligonucleotide structures that may be used in some embodiments to reduce or inhibit the expression of KHK are microRNA (miRNA), short hairpin RNA (shRNA) and short siRNA (see, e.g., Hamilton et al. (2002) EMBO J. 21:4671-79; see also, US Patent Application Publication No. 2009/0099115).

[0336] Still, in some embodiments, an oligonucleotide for reducing or inhibiting KHK expression herein is single-stranded (ss). Such structures may include but are not limited to single-stranded RNAi molecules. Recent efforts have demonstrated the activity of ss RNAi molecules (see, e.g., Matsui et al. (2016) MOL. THER. 24:946-955). However, in some embodiments, oligonucleotides herein are antisense oligonucleotides (ASOs). An antisense oligonucleotide is a single-stranded oligonucleotide that has a nucleobase sequence which, when written in the 5′ to 3′ direction, comprises the reverse complement of a targeted segment of a particular nucleic acid and is suitably modified (e.g., as a gapmer) so as to induce RNaseH-mediated cleavage of its target RNA in cells or (e.g., as a mixmer) so as to inhibit translation of the target mRNA in cells. ASOs for use herein may be modified in any suitable manner known in the art including, for example, as shown in U.S. Pat. No. 9,567,587 (including, e.g., length, sugar moieties of the nucleobase (pyrimidine, purine), and alterations of the heterocyclic portion of the nucleobase). Further, ASOs have been used for decades to reduce expression of specific target genes (see, e.g., Bennett et al. (2017) ANNU. REV. PHARMACOL. 57:81-105).

[0337] In some embodiments, the antisense oligonucleotide shares a region of complementarity with KHK mRNA. In some embodiments, the antisense oligonucleotide targets SEQ ID NO: 1. In some embodiments, the antisense oligonucleotide targets SEQ ID NO: 2. In some embodiments, the antisense oligonucleotide targets SEQ ID NO: 3. In some embodiments, the antisense oligonucleotide is 15-50 nucleotides in length. In some embodiments, the antisense oligonucleotide is 15-25 nucleotides in length. In some embodiments, the antisense oligonucleotide is 22 nucleotides in length. In some embodiments, the antisense oligonucleotide is complementary to any one of SEQ ID NOs: 4-387. In some embodiments, the antisense oligonucleotide is complementary to nucleotides 1-19 of any one of SEQ ID NOs: 4-387. In some embodiments, the antisense oligonucleotide is at least 15 contiguous nucleotides in length. In some embodiments, the antisense oligonucleotide is at least 19 contiguous nucleotides in length. In some embodiments, the antisense oligonucleotide is at least 20 contiguous nucleotides in length. In some embodiments, the antisense oligonucleotide differs by 1, 2, or 3 nucleotides from the target sequence.

### Double-Stranded Oligonucleotides

[0338] In some aspects, the disclosure provides double-stranded (ds) RNAi oligonucleotides for targeting KHK mRNA and inhibiting KHK expression (e.g., via the RNAi pathway) comprising a sense strand (also referred to herein as a passenger strand) and an antisense strand (also referred to herein as a guide strand). In some embodiments, the sense strand and antisense strand are separate strands and are not covalently linked. In some embodiments, the sense strand and antisense strand are covalently linked. In some embodiments, the sense strand and antisense strand form a duplex region, wherein the sense strand and antisense strand, or a portion thereof, binds with one another in a complementary fashion (e.g., by Watson-Crick base pairing).

[0339] In some embodiments, the sense strand has a first region (R1) and a second region (R2), wherein R2 comprises a first subregion (S1), a tetraloop (L) or triloop (triL), and a second subregion (S2), wherein L or triL is located between S1 and S2, and wherein S1 and S2 form a second duplex (D2). D2 may have various length. In some embodiments, D2 is about 1-6 bp in length. In some embodiments, D2 is 2-6, 3-6, 4-6, 5-6, 1-5, 2-5, 3-5 or 4-5 bp in length. In some embodiments, D2 is 1, 2, 3, 4, 5 or 6 bp in length. In some embodiments, D2 is 6 bp in length.

[0340] In some embodiments, R¹ of the sense strand and the antisense strand form a first duplex (D1). In some embodiments, D1 is at least about 15 (e.g., at least 15, at least 16, at least 17, at least 18, at least 19, at least 20 or at least 21) nucleotides in length. In some embodiments, D1 is in the range of about 12 to 30 nucleotides in length (e.g., 12 to 30, 12 to 27, 15 to 22, 18 to 22, 18 to 25, 18 to 27, 18 to 30 or 21 to 30 nucleotides in length). In some embodiments, D1 is at least 12 nucleotides in length (e.g., at least 12, at least 15, at least 20, at least 25, or at least 30 nucleotides in length). In some embodiments, D1 is 12, 13, 14, 15, 16, 17, 18, 19, 20, 21, 22, 23, 24, 25, 26, 27, 28, 29 or 30 nucleotides in length. In some embodiments, D1 is 20 nucleotides in length. In some embodiments, D1 comprising sense strand and antisense strand does not span the entire length of the sense strand and/or antisense strand. In some embodiments, D1 comprising the sense strand and antisense strand spans the entire length of either the sense strand or antisense strand or both. In certain embodiments, D1 comprising the sense strand and antisense strand spans the entire length of both the sense strand and the antisense strand.

[0341] In some embodiments, a dsRNAi provided herein comprises a sense strand having a sequence of any one of SEQ ID NOs: 4-387; and an antisense strand comprising a complementary sequence selected from SEQ ID NOs: 388-771 as is arranged Table 2.

[0342] In some embodiments, a dsRNAi oligonucleotide comprises a sense strand and an antisense strand comprising nucleotide sequences selected from:
[0343] (a) SEQ ID NOs: 886 and 912, respectively;
[0344] (b) SEQ ID NOs: 887 and 913, respectively;
[0345] (c) SEQ ID NOs: 910 and 937, respectively;
[0346] (d) SEQ ID NOs: 888 and 914, respectively;
[0347] (e) SEQ ID NOs: 889 and 915, respectively;
[0348] (f) SEQ ID NOs: 890 and 916, respectively;
[0349] (g) SEQ ID NOs: 891 and 917, respectively;
[0350] (h) SEQ ID NOs: 877 and 884, respectively;
[0351] (i) SEQ ID NOs: 878 and 930, respectively;
[0352] (j) SEQ ID NOs: 876 and 883, respectively;
[0353] (k) SEQ ID NOs: 875 and 882, respectively;
[0354] (l) SEQ ID NOs: 892 and 918, respectively;
[0355] (m) SEQ ID NOs: 893 and 919, respectively;
[0356] (n) SEQ ID NOs: 894 and 920, respectively;
[0357] (o) SEQ ID NOs: 904 and 931, respectively;
[0358] (p) SEQ ID NOs: 895 and 921, respectively;
[0359] (q) SEQ ID NOs: 905 and 932, respectively;
[0360] (r) SEQ ID NOs: 896 and 922, respectively;
[0361] (s) SEQ ID NOs: 911 and 938, respectively;
[0362] (t) SEQ ID NOs: 906 and 933, respectively;
[0363] (u) SEQ ID NOs: 897 and 923, respectively;
[0364] (v) SEQ ID NOs: 907 and 934, respectively;
[0365] (w) SEQ ID NOs: 908 and 935, respectively;
[0366] (x) SEQ ID NOs: 903 and 929, respectively;
[0367] (y) SEQ ID NOs: 901 and 927, respectively;
[0368] (z) SEQ ID NOs: 874 and 881, respectively;
[0369] (aa) SEQ ID NOs: 902 and 928, respectively;
[0370] (bb) SEQ ID NOs: 873 and 880, respectively;
[0371] (cc) SEQ ID NOs: 872 and 879, respectively;
[0372] (dd) SEQ ID NOs: 898 and 924, respectively;
[0373] (ee) SEQ ID NOs: 899 and 925, respectively
[0374] (ff) SEQ ID NOs: 900 and 926, respectively; and
[0375] (gg) SEQ ID NOs: 909 and 936, respectively.

[0376] In some embodiments, a dsRNAi oligonucleotide comprises a sense strand and an antisense strand comprising nucleotide sequences selected from:
[0377] (a) SEQ ID NOs: 887 and 913, respectively;
[0378] (b) SEQ ID NOs: 891 and 917, respectively;
[0379] (c) SEQ ID NOs: 892 and 918, respectively;
[0380] (d) SEQ ID NOs: 894 and 920, respectively;
[0381] (e) SEQ ID NOs: 897 and 923, respectively; and
[0382] (f) SEQ ID NOs: 909 and 936, respectively.

[0383] In some embodiments, the sense strand comprises the sequence of SEQ ID NO: 887 and the antisense strand comprises the sequence of SEQ ID NO: 913. In some embodiments, the sense strand comprises the sequence of SEQ ID NO: 891 and the antisense strand comprises the sequence of SEQ ID NO: 917. In some embodiments, the sense strand comprises the sequence of SEQ ID NO: 892 and the antisense strand comprises the sequence of SEQ ID NO: 918. In some embodiments, the sense strand comprises the sequence of SEQ ID NO: 894 and the antisense strand comprises the sequence of SEQ ID NO: 920. In some embodiments, the sense strand comprises the sequence of SEQ ID NO: 897 and the antisense strand comprises the sequence of SEQ ID NO: 923. In some embodiments, the sense strand comprises the sequence of SEQ ID NO: 909 and the antisense strand comprises the sequence of SEQ ID NO: 936.

[0384] It should be appreciated that, in some embodiments, sequences presented in the Sequence Listing may be referred to in describing the structure of an oligonucleotide (e.g., a dsRNAi oligonucleotide) or other nucleic acid. In such embodiments, the actual oligonucleotide or other nucleic acid may have one or more alternative nucleotides (e.g., an RNA counterpart of a DNA nucleotide or a DNA counterpart of an RNA nucleotide) and/or one or more modified nucleotides and/or one or more modified internucleotide linkages and/or one or more other modification when compared with the specified sequence while retaining essentially same or similar complementary properties as the specified sequence.

[0385] In some embodiments, a dsRNAi oligonucleotide herein comprises a 25-nucleotide sense strand and a 27-nucleotide antisense strand that when acted upon by a Dicer enzyme results in an antisense strand that is incorporated into the mature RISC. In some embodiments, the sense strand of the dsRNA is longer than 27 nucleotides (e.g., 28, 29, 30, 31, 32, 33, 34, 35, 36, 37, 38, 39, 40, 41, 42, 43, 44, 45, 46, 47, 48, 49 or 50 nucleotides). In some embodiments, the sense strand of the dsRNA is longer than 25 nucleotides (e.g., 26, 27, 28, 29 or 30 nucleotides). In some embodiments, the sense strand of the dsRNA comprises a nucleotide sequence selected from SEQ ID NOs: 4-387, wherein the nucleotide sequence is longer than 27 nucleotides (e.g., 28, 29, 30, 31, 32, 33, 34, 35, 36, 37, 38, 39, 40, 41, 42, 43, 44, 45, 46, 47, 48, 49 or 50 nucleotides). In some embodiments, the sense strand of the dsRNA comprises a nucleotide sequence selected from SEQ ID NOs: 4-387, wherein the nucleotide sequence is longer than 25 nucleotides (e.g., 26, 27, 28, 29 or 30 nucleotides).

[0386] In some embodiments, oligonucleotides herein have one 5′ end that is thermodynamically less stable when compared to the other 5′ end. In some embodiments, an asymmetric oligonucleotide is provided that includes a blunt end at the 3′ end of a sense strand and a 3′-overhang at the 3′ end of an antisense strand. In some embodiments, the 3′-overhang on the antisense strand is about 1-8 nucleotides in length (e.g., 1, 2, 3, 4, 5, 6, 7 or 8 nucleotides in length). Typically, a dsRNAi oligonucleotide has a two-nucleotide overhang on the 3′ end of the antisense (guide) strand. However, other overhangs are possible. In some embodiments, an overhang is a 3′-overhang comprising a length of between 1 and 6 nucleotides, optionally 1 to 5, 1 to 4, 1 to 3, 1 to 2, 2 to 6, 2 to 5, 2 to 4, 2 to 3, 3 to 6, 3 to 5, 3 to 4, 4 to 6, 4 to 5, 5 to 6 nucleotides, or 1, 2, 3, 4, 5 or 6 nucleotides. However, in some embodiments, the overhang is a 5′-overhang comprising a length of between 1 and 6 nucleotides, optionally 1 to 5, 1 to 4, 1 to 3, 1 to 2, 2 to 6, 2 to 5, 2 to 4, 2 to 3, 3 to 6, 3 to 5, 3 to 4, 4 to 6, 4 to 5, 5 to 6 nucleotides, or 1, 2, 3, 4, 5 or 6 nucleotides. In some embodiments, the oligonucleotide comprises a targeting sequence or a region of complementarity that is complementary to a contiguous sequence of nucleotides of any one of SEQ ID NOs: 4-387, and a 5′-overhang comprising a length of between 1 and 6 nucleotides. In some embodiments, the oligonucleotide comprises a sense strand comprising a nucleotide sequence selected from SEQ ID NOs: 4-387, wherein the oligonucleotide comprises a 5′-overhang comprising a length of between 1 and 6 nucleotides. In some embodiments, the oligonucleotide comprises an antisense strand comprising a nucleotide sequence selected from SEQ ID NOs: 388-771, wherein the oligonucleotide comprises a 5′-overhang comprising a length of between 1 and 6 nucleotides. In some embodiments, the oligonucleotide comprises a sense strand comprising a nucleotide sequence selected from SEQ ID NOs: 4-387 and antisense strand comprising a nucleotide sequence selected from SEQ ID NOs: 388-771, wherein the oligonucleotide comprises a 5′-overhang comprising a length of between 1 and 6 nucleotides.

[0387] In some embodiments, two terminal nucleotides on the 3′ end of an antisense strand are modified. In some embodiments, the two terminal nucleotides on the 3′ end of the antisense strand are complementary with the target mRNA (e.g., KHK mRNA). In some embodiments, the two terminal nucleotides on the 3′ end of the antisense strand are not complementary with the target mRNA. In some embodiments, the two terminal nucleotides on the 3′ end of the antisense strand of a dsRNAi oligonucleotide herein are unpaired. In some embodiments, the two terminal nucleotides on the 3′ end of the antisense strand of a dsRNAi oligonucleotide herein comprise an unpaired GG. In some embodiments, the two terminal nucleotides on the 3′ end of an antisense strand of a dsRNAi oligonucleotide herein are not complementary to the target mRNA. In some embodiments, two terminal nucleotides on each 3′ end of a dsRNAi oligonucleotide are GG. Typically, one or both of the two terminal GG nucleotides on each 3′ end of a double-stranded oligonucleotide is not complementary with the target mRNA. In some embodiments, the oligonucleotide comprises a targeting sequence or a region of complementarity that is complementary to a contiguous sequence of nucleotides of any one of SEQ ID NOs: 4-387, wherein the two terminal nucleotides on the 3′ end of the antisense strand of a dsRNAi oligonucleotide herein comprise an unpaired GG. In some embodiments, the oligonucleotide comprises a targeting sequence or a region of complementarity that is complementary to a contiguous sequence of nucleotides of nucleotides 1-19 of any one of SEQ ID NOs: 4-387, wherein the two terminal nucleotides on the 3′ end of the antisense strand of a dsRNAi oligonucleotide herein comprise an unpaired GG. In some embodiments, the oligonucleotide comprises an antisense strand comprising a nucleotide sequence selected from SEQ ID NOs: 388-771, wherein the two terminal nucleotides on the 3′ end of the antisense strand of a dsRNAi oligonucleotide herein comprise an unpaired GG. In some embodiments, the oligonucleotide comprises a sense strand comprising a nucleotide sequence selected from SEQ ID NOs: 4-387 and antisense strand comprising a nucleotide sequence selected from SEQ ID NOs: 388-771, wherein the two terminal nucleotides on the 3′ end of the antisense strand of a dsRNAi oligonucleotide herein comprise an unpaired GG.

[0388] In some embodiments, there is one or more (e.g., 1, 2, 3, 4 or 5) mismatch(es) between a sense and antisense strand. If there is more than one mismatch between a sense and antisense strand, they may be positioned consecutively (e.g., 2, 3 or more in a row), or interspersed throughout the region of complementarity. In some embodiments, the 3′ end of the sense strand contains one or more mismatches. In some embodiments, two mismatches are incorporated at the 3′ end of the sense strand. In some embodiments, base mismatches, or destabilization of segments at the 3′ end of the sense strand of the dsRNAi oligonucleotide improves or increases the potency of the dsRNAi oligonucleotide. In some embodiments, the sense and antisense strands of an oligonucleotide comprise nucleotide sequences selected from the group consisting of:
[0389] (a) SEQ ID NOs: 909 and 936, respectively;
[0390] (b) SEQ ID NOs: 894 and 920, respectively;
[0391] (c) SEQ ID NOs: 897 and 923, respectively;
[0392] (d) SEQ ID NOs: 892 and 918, respectively;
[0393] (e) SEQ ID NOs: 891 and 917, respectively; and
[0394] (f) SEQ ID NOs: 887 and 913, respectively;
   wherein there is one or more (e.g., 1, 2, 3, 4 or 5) mismatch(es) between the sense and antisense strands.

### Antisense Strands

[0395] In some embodiments, an antisense strand of a dsRNAi oligonucleotide is referred to as a “guide strand.” For example, an antisense strand that engages with RNA-induced silencing complex (RISC) and binds to an Argonaute protein such as Ago2, or engages with or binds to one or more similar factors, and directs silencing of a target gene, as the antisense strand is referred to as a guide strand. In some embodiments, a sense strand complementary to a guide strand may be referred to as a “passenger strand.”

[0396] In some embodiments, a dsRNAi oligonucleotide herein comprises an antisense strand of up to about 50 nucleotides in length (e.g., up to 50, up to 40, up to 35, up to 30, up to 27, up to 25, up to 21, up to 19, up to 17 or up to 12 nucleotides in length). In some embodiments, a dsRNAi oligonucleotide comprises an antisense strand of at least about 12 nucleotides in length (e.g., at least 12, at least 15, at least 19, at least 21, at least 22, at least 25, at least 27, at least 30, at least 35 or at least 38 nucleotides in length). In some embodiments, a dsRNAi oligonucleotide comprises an antisense strand in a range of about 12 to about 40 (e.g., 12 to 40, 12 to 36, 12 to 32, 12 to 28, 15 to 40, 15 to 36, 15 to 32, 15 to 28, 17 to 22, 17 to 25, 19 to 27, 19 to 30, 20 to 40, 22 to 40, 25 to 40 or 32 to 40) nucleotides in length. In some embodiments, a dsRNAi oligonucleotide comprises antisense strand of 15 to 30 nucleotides in length. In some embodiments, an antisense strand of any one of the dsRNAi oligonucleotides disclosed herein is of 12, 13, 14, 15, 16, 17, 18, 19, 20, 21, 22, 23, 24, 25, 26, 27, 28, 29, 30, 31, 32, 33, 34, 35, 36, 37, 38, 39 or 40 nucleotides in length. In some embodiments, a dsRNAi oligonucleotide comprises an antisense strand of 22 nucleotides in length.

[0397] In some embodiments, a dsRNAi oligonucleotide disclosed herein for targeting KHK comprises an antisense strand comprising or consisting of a sequence as set forth in any one of SEQ ID NOs: 388-771. In some embodiments, a dsRNAi oligonucleotide herein comprises an antisense strand comprising at least about 12 (e.g., at least 12, at least 13, at least 14, at least 15, at least 16, at least 17, at least 18, at least 19, at least 20, at least 21, at least 22 or at least 23) contiguous nucleotides of a sequence as set forth in any one of SEQ ID NOs: 388-771. In some embodiments, a dsRNAi oligonucleotide disclosed herein for targeting KHK comprises an antisense strand comprising or consisting of a sequence as set forth in any one of SEQ ID NOs: 879-885 and 912-938. In some embodiments, a dsRNAi oligonucleotide herein comprises an antisense strand comprising at least about 12 (e.g., at least 12, at least 13, at least 14, at least 15, at least 16, at least 17, at least 18, at least 19, at least 20, at least 21, at least 22 or at least 23) contiguous nucleotides of a sequence as set forth in any one of SEQ ID NOs: 879-885 and 912-938. In some embodiments, a dsRNAi oligonucleotide disclosed herein for targeting KHK comprises an antisense strand comprising or consisting of a sequence as set forth in any one of SEQ ID NOs: 913, 917, 918, 920, 923 and 936. In some embodiments, a dsRNAi oligonucleotide herein comprises an antisense strand comprising at least about 12 (e.g., at least 12, at least 13, at least 14, at least 15, at least 16, at least 17, at least 18, at least 19, at least 20, at least 21, at least 22 or at least 23) contiguous nucleotides of a sequence as set forth in any one of SEQ ID NOs: 913, 917, 918, 920, 923 and 936.

[0398] In some embodiments, a dsRNAi oligonucleotide herein comprises an antisense strand comprising a nucleotide sequence selected from SEQ ID NOs: 948-953.

### Sense Strands

[0399] In some embodiments, a dsRNAi oligonucleotide disclosed herein for targeting KHK mRNA and inhibiting KHK expression comprises a sense strand sequence as set forth in any one of SEQ ID NOs: 4-387. In some embodiments, a dsRNAi oligonucleotide has a sense strand that comprises at least about 12 (e.g., at least 13, at least 14, at least 15, at least 16, at least 17, at least 18, at least 19, at least 20, at least 21, at least 22 or at least 23) contiguous nucleotides of a sequence as set forth in any one of SEQ ID NOs: 4-387. In some embodiments, a dsRNAi oligonucleotide disclosed herein for targeting KHK mRNA and inhibiting KHK expression comprises a sense strand sequence as set forth in any one of SEQ ID NOs: 872-878 and 886-911. In some embodiments, a dsRNAi oligonucleotide has a sense strand that comprises at least about 12 (e.g., at least 13, at least 14, at least 15, at least 16, at least 17, at least 18, at least 19, at least 20, at least 21, at least 22 or at least 23) contiguous nucleotides of a sequence as set forth in in any one of SEQ ID NOs: 872-878 and 886-911. In some embodiments, a dsRNAi oligonucleotide disclosed herein for targeting KHK mRNA and inhibiting KHK expression comprises a sense strand sequence as set forth in any one of SEQ ID NOs: 887, 891, 892, 894, 897 and 909. In some embodiments, a dsRNAi oligonucleotide has a sense strand that comprises at least about 12 (e.g., at least 13, at least 14, at least 15, at least 16, at least 17, at least 18, at least 19, at least 20, at least 21, at least 22 or at least 23) contiguous nucleotides of a sequence as set forth in any one of SEQ ID NOs: 887, 891, 892, 894, 897 and 909.

[0400] In some embodiments, a dsRNAi oligonucleotide herein comprises a sense strand (or passenger strand) of up to about 50 nucleotides in length (e.g., up to 50, up to 40, up to 36, up to 30, up to 27, up to 25, up to 21, up to 19, up to 17 or up to 12 nucleotides in length). In some embodiments, a dsRNAi oligonucleotide may have a sense strand of at least about 12 nucleotides in length (e.g., at least 12, at least 15, at least 19, at least 21, at least 25, at least 27, at least 30, at least 36 or at least 38 nucleotides in length). In some embodiments, an oligonucleotide may have a sense strand in a range of about 12 to about 50 (e.g., 12 to 50, 12 to 40, 12 to 36, 12 to 32, 12 to 28, 15 to 40, 15 to 36, 15 to 32, 15 to 28, 17 to 21, 17 to 25, 19 to 27, 19 to 30, 20 to 40, 22 to 40, 25 to 40 or 32 to 40) nucleotides in length. In some embodiments, a dsRNAi oligonucleotide comprises a sense strand of 15 to 50 nucleotides in length. In some embodiments, a dsRNAi oligonucleotide comprises a sense strand of 18 to 36 nucleotides in length. In some embodiments, an oligonucleotide may have a sense strand of 12, 13, 14, 15, 16, 17, 18, 19, 20, 21, 22, 23, 24, 25, 26, 27, 28, 29, 30, 31, 32, 33, 34, 35, 36, 37, 38, 39, 40, 41, 42, 43, 44, 45, 46, 47, 48, 49, or 50 nucleotides in length. In some embodiments, a dsRNAi oligonucleotide comprises a sense strand of 36 nucleotides in length.

[0401] In some embodiments, a sense strand comprises a stem-loop structure at its 3′ end. In some embodiments, the stem-loop is formed by intrastrand base pairing. In some embodiments, a sense strand comprises a stem-loop structure at its 5′ end. In some embodiments, a stem is a duplex of 2, 3, 4, 5, 6, 7, 8, 9, 10, 11, 12, 13 or 14 nucleotides in length. In some embodiments, a stem-loop provides the dsRNAi oligonucleotide protection against degradation (e.g., enzymatic degradation), facilitates or improves targeting and/or delivery to a target cell, tissue, or organ (e.g., the liver), or both. For example, in some embodiments, the loop of a stem-loop provides nucleotides comprising one or more modifications that facilitate, improve, or increase targeting to a target mRNA (e.g., a KHK mRNA), inhibition of target gene expression (e.g., KHK expression), and/or delivery to a target cell, tissue, or organ (e.g., the liver), or a combination thereof. In some embodiments, the stem-loop itself or modification(s) to the stem-loop do not substantially affect the inherent gene expression inhibition activity of the dsRNAi oligonucleotide, but facilitates, improves, or increases stability (e.g., provides protection against degradation) and/or delivery of the oligonucleotide to a target cell, tissue, or organ (e.g., the liver). In certain embodiments, a dsRNAi oligonucleotide comprises a sense strand comprising (e.g., at its 3′ end) a stem-loop set forth as: S1-L-S2, in which S1 is complementary to S2, and in which L forms a single-stranded loop between S1 and S2 of up to about 10 nucleotides in length (e.g., 3, 4, 5, 6, 7, 8, 9 or 10 nucleotides in length). In some embodiments, the loop (L) is 3 nucleotides in length. In some embodiments, the loop (L) is 4 nucleotides in length. In some embodiments, an oligonucleotide comprises a targeting sequence or a region of complementarity that is complementary to a contiguous sequence of nucleotides of any one of SEQ ID NOs: 4-387, and the oligonucleotide comprises a sense strand comprising (e.g., at its 3′ end) a stem-loop set forth as: S1-L-S2, in which S1 is complementary to S2, and in which L forms a single-stranded loop between S1 and S2 of up to about 10 nucleotides in length (e.g., 3, 4, 5, 6, 7, 8, 9 or 10 nucleotides in length). In some embodiments, an oligonucleotide comprises a targeting sequence or a region of complementarity that is complementary to a contiguous sequence of nucleotides 1-19 of any one of SEQ ID NOs: 4-387, and the oligonucleotide comprises a sense strand comprising (e.g., at its 3′ end) a stem-loop set forth as: S1-L-S2, in which S1 is complementary to S2, and in which L forms a single-stranded loop between S1 and S2 of up to about 10 nucleotides in length (e.g., 3, 4, 5, 6, 7, 8, 9 or 10 nucleotides in length). In some embodiments, the oligonucleotide comprises a targeting sequence or a region of complementarity that is complementary to a contiguous sequence of nucleotides of any one of SEQ ID NOs: 872-878 and 886-911, and the oligonucleotide comprises a sense strand comprising (e.g., at its 3′ end) a stem-loop set forth as: S1-L-S2, in which S1 is complementary to S2, and in which L forms a single-stranded loop between S1 and S2 of up to about 10 nucleotides in length (e.g., 3, 4, 5, 6, 7, 8, 9 or 10 nucleotides in length). In some embodiments, the oligonucleotide comprises a targeting sequence or a region of complementarity that is complementary to a contiguous sequence of nucleotides of any one of SEQ ID NOs: 887, 891, 892, 894, 897, and 909, and the oligonucleotide comprises a sense strand comprising (e.g., at its 3′ end) a stem-loop set forth as: S1-L-S2, in which S1 is complementary to S2, and in which L forms a single-stranded loop between S1 and S2 of up to about 10 nucleotides in length (e.g., 3, 4, 5, 6, 7, 8, 9 or 10 nucleotides in length).

[0402] In some embodiments, a loop (L) of a stem-loop having the structure S1-L-S2 as described above is a triloop. In some embodiments, the oligonucleotide comprises a targeting sequence or a region of complementarity that is complementary to a contiguous sequence of nucleotides of any one of SEQ ID NOs: 4-387 and a triloop. In some embodiments, the oligonucleotide comprises a targeting sequence or a region of complementarity that is complementary to a contiguous sequence of nucleotides 1-19 of any one of SEQ ID NOs: 4-387 and a triloop. In some embodiments, the oligonucleotide comprises a targeting sequence or a region of complementarity that is complementary to a contiguous sequence of nucleotides of any one of SEQ ID NOs: 872-878 and 886-911, and a triloop. In some embodiments, the oligonucleotide comprises a targeting sequence or a region of complementarity that is complementary to a contiguous sequence of nucleotides of any one of SEQ ID NOs: 887, 891, 892, 894, 897, and 909, and a triloop. In some embodiments, the triloop comprises ribonucleotides, deoxyribonucleotides, modified nucleotides, delivery ligands, and combinations thereof.

[0403] In some embodiments, a loop (L) of a stem-loop having the structure S1-L-S2 as described above is a tetraloop (e.g., within a nicked tetraloop structure) comprises a targeting sequence or a region of complementarity that is complementary to a contiguous sequence of nucleotides of any one of SEQ ID NOs: 4-387 and a tetraloop. In some embodiments, a loop (L) of a stem-loop having the structure S1-L-S2 as described above is a tetraloop (e.g., within a nicked tetraloop structure) comprises a targeting sequence or a region of complementarity that is complementary to a contiguous sequence of nucleotides 1-19 of any one of SEQ ID NOs: 4-387 and a tetraloop. In some embodiments, the oligonucleotide comprises a targeting sequence or a region of complementarity that is complementary to a contiguous sequence of nucleotides of any one of SEQ ID NOs: 872-878 and 886-911, and a tetraloop. In some embodiments, the oligonucleotide comprises a targeting sequence or a region of complementarity that is complementary to a contiguous sequence of nucleotides of any one of SEQ ID NOs: 887, 891, 892, 894, 897, and 909, and a tetraloop. In some embodiments, the tetraloop comprises ribonucleotides, deoxyribonucleotides, modified nucleotides, delivery ligands, and combinations thereof.

[0404] In some embodiments, a dsRNAi oligonucleotide herein comprises a sense strand comprising a nucleotide sequence selected from SEQ ID NOs: 942-947.

### Duplex Length

[0405] In some embodiments, a duplex formed between a sense and antisense strand is at least 12 (e.g., at least 15, at least 16, at least 17, at least 18, at least 19, at least 20, or at least 21) nucleotides in length. In some embodiments, a duplex formed between a sense and antisense strand is in the range of 12-30 nucleotides in length (e.g., 12 to 30, 12 to 27, 12 to 22, 15 to 25, 18 to 30, 18 to 22, 18 to 25, 18 to 27, 18 to 30, 19 to 30 or 21 to 30 nucleotides in length). In some embodiments, a duplex formed between a sense and antisense strand is 12, 13, 14, 15, 16, 17, 18, 19, 29, 21, 22, 23, 24, 25, 26, 27, 28, 29 or 30 nucleotides in length. In some embodiments, a duplex formed between a sense and antisense strand does not span the entire length of the sense strand and/or antisense strand. In some embodiments, a duplex between a sense and antisense strand spans the entire length of either the sense or antisense strands. In some embodiments, a duplex between a sense and antisense strand spans the entire length of both the sense strand and the antisense strand. In some embodiments, the sense and antisense strands of an oligonucleotide comprise nucleotide sequences selected from the group consisting of:
[0406] (a) SEQ ID NOs: 909 and 936, respectively;
[0407] (b) SEQ ID NOs: 894 and 920, respectively;
[0408] (c) SEQ ID NOs: 897 and 923, respectively;
[0409] (d) SEQ ID NOs: 892 and 918, respectively;
[0410] (e) SEQ ID NOs: 891 and 917, respectively; and
[0411] (f) SEQ ID NOs: 887 and 913, respectively;
   wherein a duplex formed between a sense and antisense strand is in the range of 12-30 nucleotides in length (e.g., 12 to 30, 12 to 27, 12 to 22, 15 to 25, 18 to 30, 18 to 22, 18 to 25, 18 to 27, 18 to 30, 19 to 30 or 21 to 30 nucleotides in length).

### Oligonucleotide Ends

[0412] In some embodiments, a dsRNAi oligonucleotide herein comprises sense and antisense strands, such that there is a 3′-overhang on either the sense strand or the antisense strand, or both the sense and antisense strand. In some embodiments, a dsRNAi oligonucleotide herein comprises sense and antisense strands that are separate strands which form an asymmetric duplex region having an overhang at the 3′ terminus of the antisense strand. In some embodiments, a dsRNAi oligonucleotide provided herein has one 5′end that is thermodynamically less stable compared to the other 5′ end. In some embodiments, an asymmetric dsRNAi oligonucleotide is provided that includes a blunt end at the 3′end of a sense strand and overhang at the 3′ end of the antisense strand. In some embodiments, a 3′ overhang on an antisense strand is 1-8 nucleotides in length (e.g., 1, 2, 3, 4, 5, 6, 7 or 8 nucleotides in length). In some embodiments, the sense and antisense strands of an oligonucleotide comprise nucleotide sequences selected from the group consisting of:
[0413] (a) SEQ ID NOs: 909 and 936, respectively;
[0414] (b) SEQ ID NOs: 894 and 920, respectively;
[0415] (c) SEQ ID NOs: 897 and 923, respectively;
[0416] (d) SEQ ID NOs: 892 and 918, respectively;
[0417] (e) SEQ ID NOs: 891 and 917, respectively; and
[0418] (f) SEQ ID NOs: 887 and 913, respectively;
   wherein the antisense strand comprises a 3′ overhang of 1-8 nucleotides in length (e.g., 1, 2, 3, 4, 5, 6, 7 or 8 nucleotides in length).

[0419] Typically, an oligonucleotide for RNAi has a two (2) nucleotide overhang on the 3′ end of the antisense (guide) strand. However, other overhangs are possible. In some embodiments, an overhang is a 3′ overhang comprising a length of between one and six nucleotides, optionally one to five, one to four, one to three, one to two, two to six, two to five, two to four, two to three, three to six, three to five, three to four, four to six, four to five, five to six nucleotides or one, two, three, four, five or six nucleotides. In some embodiments, the overhang is a 5′ overhang comprising a length of between one and six nucleotides, optionally one to five, one to four, one to three, one to two, two to six, two to five, two to four, two to three, three to six, three to five, three to four, four to six, four to five, five to six nucleotides or one, two, three, four, five or six nucleotides. In some embodiments, the sense and antisense strands of an oligonucleotide comprise nucleotide sequences selected from the group consisting of:
[0420] (a) SEQ ID NOs: 909 and 936, respectively;
[0421] (b) SEQ ID NOs: 894 and 920, respectively;
[0422] (c) SEQ ID NOs: 897 and 923, respectively;
[0423] (d) SEQ ID NOs: 892 and 918, respectively;
[0424] (e) SEQ ID NOs: 891 and 917, respectively; and
[0425] (f) SEQ ID NOs: 887 and 913, respectively;
   wherein the antisense strand comprises a 5′ overhang of 1-6 nucleotides in length.

[0426] In some embodiments, one or more (e.g., 2, 3, 4) terminal nucleotides of the 3′ end or 5′ end of a sense and/or antisense strand are modified. For example, in some embodiments, one or two terminal nucleotides of the 3′ end of the antisense strand are modified. In some embodiments, the last nucleotide at the 3′ end of an antisense strand is modified, e.g., comprises 2′ modification, e.g., a 2′-O-methoxyethyl. In some embodiments, the last one or two terminal nucleotides at the 3′ end of an antisense strand are complementary with the target. In some embodiments, the last one or two nucleotides at the 3′ end of the antisense strand are not complementary with the target.

[0427] In some embodiments, a dsRNAi oligonucleotide herein comprises a stem-loop structure at the 3′ end of the sense strand and comprises two terminal overhang nucleotides at the 3′ end of the antisense strand. In some embodiments, a dsRNAi oligonucleotide herein comprises a nicked tetraloop structure, wherein the 3′ end of the sense strand comprises a stem-tetraloop structure and comprises two terminal overhang nucleotides at the 3′ end of the antisense strand. In some embodiments, the two terminal overhang nucleotides are GG. Typically, one or both of the two terminal GG nucleotides of the antisense strand are not complementary with the target.

[0428] In some embodiments, the 5′ end and/or the 3′end of a sense or antisense strand has an inverted cap nucleotide.

[0429] In some embodiments, one or more (e.g., 2, 3, 4, 5, 6) modified internucleotide linkages are provided between terminal nucleotides of the 3′ end or 5′ end of a sense and/or antisense strand. In some embodiments, modified internucleotide linkages are provided between overhang nucleotides at the 3′ end or 5′ end of a sense and/or antisense strand.

### Oligonucleotide Modifications

[0430] In some embodiments, a dsRNAi oligonucleotide described herein comprises a modification. Oligonucleotides (e.g., dsRNAi oligonucleotides) may be modified in various ways to improve or control specificity, stability, delivery, bioavailability, resistance from nuclease degradation, immunogenicity, base-pairing properties, RNA distribution and cellular uptake and other features relevant to therapeutic or research use.

[0431] In some embodiments, the modification is a modified sugar. In some embodiments, the modification is a 5′-terminal phosphate group. In some embodiments, the modification is a modified internucleotide linkage. In some embodiments, the modification is a modified base. In some embodiments, an oligonucleotide described herein can comprise any one of the modifications described herein or any combination thereof. For example, in some embodiments, an oligonucleotide described herein comprises at least one modified sugar, a 5′-terminal phosphate group, at least one modified internucleotide linkage, and at least one modified base. In some embodiments, the sense and antisense strands of an oligonucleotide comprise nucleotide sequences selected from the group consisting of:
[0432] (a) SEQ ID NOs: 909 and 936, respectively;
[0433] (b) SEQ ID NOs: 894 and 920, respectively;
[0434] (c) SEQ ID NOs: 897 and 923, respectively;
[0435] (d) SEQ ID NOs: 892 and 918, respectively;
[0436] (e) SEQ ID NOs: 891 and 917, respectively; and
[0437] (f) SEQ ID NOs: 887 and 913, respectively;
   wherein the oligonucleotide comprises at least one modified sugar, a 5′-terminal phosphate group, at least one modified internucleotide linkage, and at least one modified base.

[0438] The number of modifications on an oligonucleotide (e.g., a dsRNAi oligonucleotide) and the position of those nucleotide modifications may influence the properties of an oligonucleotide. For example, oligonucleotides may be delivered in vivo by conjugating them to or encompassing them in a lipid nanoparticle (LNP) or similar carrier. However, when an oligonucleotide is not protected by an LNP or similar carrier, it may be advantageous for at least some of the nucleotides to be modified. Accordingly, in some embodiments, all or substantially all the nucleotides of an oligonucleotide are modified. In some embodiments, more than half of the nucleotides are modified. In some embodiments, less than half of the nucleotides are modified. In some embodiments, the sugar moiety of all nucleotides comprising the oligonucleotide is modified at the 2′ position. The modifications may be reversible or irreversible. In some embodiments, an oligonucleotide as disclosed herein has a number and type of modified nucleotides sufficient to cause the desired characteristics (e.g., protection from enzymatic degradation, capacity to target a desired cell after in vivo administration, and/or thermodynamic stability).

### Sugar Modifications

[0439] In some embodiments, a dsRNAi oligonucleotide described herein comprises a modified sugar. In some embodiments, a modified sugar (also referred herein to a sugar analog) includes a modified deoxyribose or ribose moiety in which, for example, one or more modifications occur at the 2′, 3′, 4′ and/or 5′ carbon position of the sugar. In some embodiments, a modified sugar may also include non-natural alternative carbon structures such as those present in locked nucleic acids (“LNA”; see, e.g., Koshkin et al. (1998) TETRAHEDON 54:3607-30), unlocked nucleic acids (“UNA”; see, e.g., Snead et al. (2013) MOL. THER-NUCL. ACIDS 2: e103) and bridged nucleic acids (“BNA”; see, e.g., Imanishi & Obika (2002) CHEM COMMUN. (CAMB) 21:1653-59).

[0440] In some embodiments, a nucleotide modification in a sugar comprises a 2′-modification. In some embodiments, a 2′-modification may be 2′-O-propargyl, 2′-O-propylamin, 2′-amino, 2′-ethyl, 2′-fluoro (2′-F), 2′-aminoethyl (EA), 2′-O-methyl (2′-OMe), 2′-O-methoxyethyl (2′-MOE), 2′-O-[2-(methylamino)-2-oxoethyl] (2′-O-NMA) or 2′-deoxy-2′-fluoro-β-d-arabinonucleic acid (2′-FANA). In some embodiments, the modification is 2′-F, 2′-OMe or 2′-MOE. In some embodiments, a modification in a sugar comprises a modification of the sugar ring, which may comprise modification of one or more carbons of the sugar ring. For example, a modification of a sugar of a nucleotide may comprise a 2′-oxygen of a sugar is linked to a 1′-carbon or 4′-carbon of the sugar, or a 2′-oxygen is linked to the 1′-carbon or 4′-carbon via an ethylene or methylene bridge. In some embodiments, a modified nucleotide has an acyclic sugar that lacks a 2′-carbon to 3′-carbon bond. In some embodiments, a modified nucleotide has a thiol group, e.g., in the 4′ position of the sugar.

[0441] In some embodiments, a dsRNAi oligonucleotide described herein comprises at least about 1 modified nucleotide (e.g., at least 1, at least 5, at least 10, at least 15, at least 20, at least 25, at least 30, at least 35, at least 40, at least 45, at least 50, at least 55, at least 60, or more). In some embodiments, the sense strand of the dsRNAi oligonucleotide comprises at least about 1 modified nucleotide (e.g., at least 1, at least 5, at least 10, at least 15, at least 20, at least 25, at least 30, at least 35, or more). In some embodiments, the antisense strand of the dsRNAi oligonucleotide comprises at least about 1 modified nucleotide (e.g., at least 1, at least 5, at least 10, at least 15, at least 20, or more).

[0442] In some embodiments, all the nucleotides of the sense strand of the dsRNAi oligonucleotide are modified. In some embodiments, all the nucleotides of the antisense strand of the dsRNAi oligonucleotide are modified. In some embodiments, all the nucleotides of the dsRNAi oligonucleotide (i.e., both the sense strand and the antisense strand) are modified. In some embodiments, the modified nucleotide comprises a 2′-modification (e.g., a 2′-F or 2′-OMe, 2′-MOE, and 2′-deoxy-2′-fluoro-β-d-arabinonucleic acid).

[0443] In some embodiments, the disclosure provides dsRNAi oligonucleotides having different modification patterns. Exemplary modification patterns are set forth in U.S. Provisional Application No. 62/909,278 and in WO 2021/067744, both incorporated herein by this reference. In some embodiments, the modified dsRNAi oligonucleotides comprise a sense strand sequence having a modification pattern as set forth in the Examples and Sequence Listing and an antisense strand having a modification pattern as set forth in the Examples and

### SEQUENCE LISTING

[0444] In some embodiments, a dsRNAi oligonucleotide disclosed herein comprises an antisense strand having nucleotides that are modified with 2′-F. In some embodiments, a dsRNAi oligonucleotide disclosed herein comprises an antisense strand comprising nucleotides that are modified with 2′-F and 2′-OMe. In some embodiments, a dsRNAi oligonucleotide disclosed herein comprises a sense strand having nucleotides that are modified with 2′-F. In some embodiments, a dsRNAi oligonucleotide disclosed herein comprises a sense strand comprising nucleotides that are modified with 2′-F and 2′-OMe.

[0445] In some embodiments, a dsRNAi oligonucleotide described herein comprises a sense strand with about 10-15%, 10%, 11%, 12%, 13%, 14% or 15% of the nucleotides of the sense strand comprising a 2′-fluoro modification. In some embodiments, about 11% of the nucleotides of the sense strand comprise a 2-fluoro modification. In some embodiments, a dsRNAi oligonucleotide described herein comprises an antisense strand with about 25-35%, 25%, 26%, 27%, 28%, 29%, 30%, 31%, 32%, 33%, 34% or 35% of the nucleotides of the antisense strand comprising a 2′-fluoro modification. In some embodiments, about 32% of the nucleotides of the antisense strand comprise a 2′-fluoro modification. In some embodiments, the dsRNAi oligonucleotide has about 15-25%, 15%, 16%, 17%, 18%, 19%, 20%, 21%, 22%, 23%, 24%, or 25% of its nucleotides comprising a 2′-fluoro modification. In some embodiments, about 19% of the nucleotides in the dsRNAi oligonucleotide comprise a 2′-fluoro modification.

[0446] In some embodiments, one or more of positions 8, 9, 10 or 11 of the sense strand is modified with a 2′—F group. In some embodiments, one or more of positions 3, 8, 9, 10, 12, 13 and 17 of the sense strand is modified with a 2′—F group. In some embodiments, one or more of positions 2, 3, 4, 5, 7, 10 and 14 of the antisense strand is modified with a 2′—F group. In some embodiments, one or more of positions 2, 3, 4, 5, 7, 8, 10, 14, 16 and 19 of the antisense strand is modified with a 2′—F group. In some embodiments, the sugar moiety at each of nucleotides at positions 1-7 and 12-20 in the sense strand is modified with a 2′-OMe. In some embodiments, the sugar moiety at each of nucleotides at positions 1-7, 12-27 and 31-36 in the sense strand is modified with a 2′-OMe. In some embodiments, the sugar moiety at each of nucleotides at positions 1-2, 4-7, 11, 14-16 and 18-20 in the sense strand is modified with a 2′-OMe. In some embodiments, the sugar moiety at each of nucleotides at positions 1-2, 4-7, 11, 14-16, 18-27 and 31-36 in the sense strand is modified with a 2′-OMe. In some embodiments, the sugar moiety at each of nucleotides at positions 1, 6, 8-9, 11-13, and 15-22 in the antisense strand is modified with a 2′-OMe. In some embodiments, the sugar moiety at each of nucleotides at positions 6, 9, 11-13, 15, 17, 18 and 20-22 in the antisense strand is modified with a 2′-OMe. In some embodiments, the sugar moiety at each of nucleotides at positions 1, 6, 9, 11-13, 15, 17, 18 and 20-22 in the antisense strand is modified with a 2′-OMe.

[0447] In some embodiments, the sense and antisense strands of an oligonucleotide comprise nucleotide sequences selected from the group consisting of:
[0448] (a) SEQ ID NOs: 909 and 936, respectively;
[0449] (b) SEQ ID NOs: 894 and 920, respectively;
[0450] (c) SEQ ID NOs: 897 and 923, respectively;
[0451] (d) SEQ ID NOs: 892 and 918, respectively;
[0452] (e) SEQ ID NOs: 891 and 917, respectively; and
[0453] (f) SEQ ID NOs: 887 and 913, respectively;
   wherein one or more of positions 8, 9, 10 or 11 of the sense strand is modified with a 2′—F group.

[0454] In some embodiments, the sense and antisense strands of an oligonucleotide comprise nucleotide sequences selected from the group consisting of:
[0455] (a) SEQ ID NOs: 909 and 936, respectively;
[0456] (b) SEQ ID NOs: 894 and 920, respectively;
[0457] (c) SEQ ID NOs: 897 and 923, respectively;
[0458] (d) SEQ ID NOs: 892 and 918, respectively;
[0459] (e) SEQ ID NOs: 891 and 917, respectively; and
[0460] (f) SEQ ID NOs: 887 and 913, respectively;
   wherein one or more of positions 3, 8, 9, 10, 12, 13 and 17 of the sense strand is modified with a 2′—F group.

[0461] In some embodiments, the antisense strand has 3 nucleotides that are modified at the 2′-position of the sugar moiety with a 2′-F. In some embodiments, the sugar moiety at positions 2, 5 and 14 and optionally up to 3 of the nucleotides at positions 1, 3, 7 and 10 of the antisense strand are modified with a 2′-F. In other embodiments, the sugar moiety at each of the positions 2, 5 and 14 of the antisense strand is modified with the 2′-F. In other embodiments, the sugar moiety at each of the positions 1, 2, 5 and 14 of the antisense strand is modified with the 2′-F. In still other embodiments, the sugar moiety at each of the positions 1, 2, 3, 5, 7 and 14 of the antisense strand is modified with the 2′-F. In yet another embodiment, the sugar moiety at each of the positions 1, 2, 3, 5, 10 and 14 of the antisense strand is modified with the 2′-F. In another embodiment, the sugar moiety at each of the positions 2, 3, 5, 7, 10 and 14 of the antisense strand is modified with the 2′-F.

[0462] In some embodiments, the antisense strand has 3 nucleotides that are modified at the 2′-position of the sugar moiety with a 2′-F. In some embodiments, the sugar moiety at positions 2, 5 and 14 and optionally up to 3 of the nucleotides at positions 3, 4, 7 and 10 of the antisense strand are modified with a 2′-F. In other embodiments, the sugar moiety at each of positions 2, 5 and 14 of the antisense strand is modified with the 2′-F. In other embodiments, the sugar moiety at each of positions 2, 4, 5 and 14 of the antisense strand is modified with the 2′-F. In still other embodiments, the sugar moiety at each of positions 2, 3, 4, 5, 7 and 14 of the antisense strand is modified with the 2′-F. In yet another embodiment, the sugar moiety at each of positions 2, 3, 4, 5, 10 and 14 of the antisense strand is modified with the 2′-F. In another embodiment, the sugar moiety at each of positions 2, 3, 4, 5, 7, 10 and 14 of the antisense strand is modified with the 2′-F. In some embodiments, the sugar moiety at each of positions 2, 3, 4, 5, 7, 8, 10, 14, 16 and 19 is modified with the 2′-F.

[0463] In some embodiments, the sense and antisense strands of an oligonucleotide comprise nucleotide sequences selected from the group consisting of:
[0464] (a) SEQ ID NOs: 909 and 936, respectively;
[0465] (b) SEQ ID NOs: 894 and 920, respectively;
[0466] (c) SEQ ID NOs: 897 and 923, respectively;
[0467] (d) SEQ ID NOs: 892 and 918, respectively;
[0468] (e) SEQ ID NOs: 891 and 917, respectively; and
[0469] (f) SEQ ID NOs: 887 and 913, respectively;
   wherein the sugar moiety at one or more positions 2, 3, 4, 5, 7, 10 and 14 of the antisense strand is modified with the 2′-F.

[0470] In some embodiments, the sense and antisense strands of an oligonucleotide comprise nucleotide sequences selected from the group consisting of:
[0471] (a) SEQ ID NOs: 909 and 936, respectively;
[0472] (b) SEQ ID NOs: 894 and 920, respectively;
[0473] (c) SEQ ID NOs: 897 and 923, respectively;
[0474] (d) SEQ ID NOs: 892 and 918, respectively;
[0475] (e) SEQ ID NOs: 891 and 917, respectively; and
[0476] (f) SEQ ID NOs: 887 and 913, respectively;
   wherein the sugar moiety at one or more positions 2, 3, 4, 5, 7, 8, 10, 14, 16 and 19 of the antisense strand is modified with the 2′-F.

[0477] In some embodiments, an oligonucleotide provided herein comprises an antisense strand having the sugar moiety at positions 2 and 14 modified with 2′-F. In some embodiments, an oligonucleotide provided herein comprises an antisense strand having the sugar moiety at positions 2, 5, and 14 modified with 2′-F. In some embodiments, an oligonucleotide provided herein comprises an antisense strand having the sugar moiety at positions 1, 2, 5, and 14 modified with 2′-F. In some embodiments, an oligonucleotide provided herein comprises an antisense strand having the sugar moiety at positions 1, 2, 3, 5, 7, and 14 modified with 2′-F. In some embodiments, an oligonucleotide provided herein comprises an antisense strand having the sugar moiety at positions 1, 2, 3, 5, 10, and 14 modified with 2′-F.

[0478] In some embodiments, an oligonucleotide provided herein comprises an antisense strand having the sugar moiety at positions 2 and 14 modified with 2′-F. In some embodiments, an oligonucleotide provided herein comprises an antisense strand having the sugar moiety at positions 2, 5, and 14 modified with 2′-F. In some embodiments, an oligonucleotide provided herein comprises an antisense strand having the sugar moiety at positions 2, 4, 5, and 14 modified with 2′-F. In some embodiments, an oligonucleotide provided herein comprises an antisense strand having the sugar moiety at positions 2, 3, 4, 5, 7, and 14 modified with 2′-F. In some embodiments, an oligonucleotide provided herein comprises an antisense strand having the sugar moiety at positions 2, 3, 4, 5, 10, and 14 modified with 2′-F. In some embodiments, an oligonucleotide provided herein comprises an antisense strand having the sugar moiety at positions 2, 3, 4, 5, 7, 10 and 14 modified with 2′-F. In some embodiments, an oligonucleotide provided herein comprises an antisense strand having the sugar moiety at positions 2, 3, 4, 5, 7, 8, 10, 14, 16 and 19 modified with 2′-F.

[0479] In some embodiments, the sense and antisense strands of an oligonucleotide comprise nucleotide sequences selected from the group consisting of:
[0480] (a) SEQ ID NOs: 909 and 936, respectively;
[0481] (b) SEQ ID NOs: 894 and 920, respectively;
[0482] (c) SEQ ID NOs: 897 and 923, respectively;
[0483] (d) SEQ ID NOs: 892 and 918, respectively;
[0484] (e) SEQ ID NOs: 891 and 917, respectively; and
[0485] (f) SEQ ID NOs: 887 and 913, respectively;
   wherein one or more of positions 8, 9, 10 or 11 of the sense strand and one or more positions 2, 3, 4, 5, 7, 10 and 14 of the antisense strand is modified with the 2′-F.

[0486] In some embodiments, the sense and antisense strands of an oligonucleotide comprise nucleotide sequences selected from the group consisting of:
[0487] (a) SEQ ID NOs: 909 and 936, respectively;
[0488] (b) SEQ ID NOs: 894 and 920, respectively;
[0489] (c) SEQ ID NOs: 897 and 923, respectively;
[0490] (d) SEQ ID NOs: 892 and 918, respectively;
[0491] (e) SEQ ID NOs: 891 and 917, respectively; and
[0492] (f) SEQ ID NOs: 887 and 913, respectively;
   wherein one or more of positions 3, 8, 9, 10, 12, 13 and 17 of the sense strand and one or more positions 2, 3, 4, 5, 7, 8, 10, 14, 16 and 19 of the antisense strand is modified with the 2′-F.

[0493] In some embodiments, an oligonucleotide provided herein comprises an antisense strand having the sugar moiety of each of the nucleotides at positions 2, 5, and 14 of the antisense strand modified with 2′-F and the sugar moiety of each of the remaining nucleotides of the antisense strand modified with a modification selected from the group consisting of 2′-O-propargyl, 2′-O-propylamin, 2′-amino, 2′-ethyl, 2′-aminoethyl (EA), 2′-O-methyl (2′-OMe), 2′-O-methoxyethyl (2′-MOE), 2′-O-[2-(methylamino)-2-oxoethyl] (2′-O-NMA), and 2′-deoxy-2′-fluoro-β-d-arabinonucleic acid (2′-FANA).

[0494] In some embodiments, an oligonucleotide provided herein comprises an antisense strand having the sugar moiety of each of the nucleotides at positions 1, 2, 5, and 14 of the antisense strand modified with 2′-F and the sugar moiety of each of the remaining nucleotides of the antisense strand modified with a modification selected from the group consisting of 2′-O-propargyl, 2′-O-propylamin, 2′-amino, 2′-ethyl, 2′-aminoethyl (EA), 2′-O-methyl (2′-OMe), 2′-O-methoxyethyl (2′-MOE), 2′-O-[2-(methylamino)-2-oxoethyl] (2′-O-NMA), and 2′-deoxy-2′-fluoro-β-d-arabinonucleic acid (2′-FANA).

[0495] In some embodiments, an oligonucleotide provided herein comprises an antisense strand having the sugar moiety of each of the nucleotides at positions 2, 4, 5, and 14 of the antisense strand modified with 2′-F and the sugar moiety of each of the remaining nucleotides of the antisense strand modified with a modification selected from the group consisting of 2′-O-propargyl, 2′-O-propylamin, 2′-amino, 2′-ethyl, 2′-aminoethyl (EA), 2′-O-methyl (2′-OMe), 2′-O-methoxyethyl (2′-MOE), 2′-O-[2-(methylamino)-2-oxoethyl] (2′-O-NMA), and 2′-deoxy-2′-fluoro-β-d-arabinonucleic acid (2′-FANA).

[0496] In some embodiments, an oligonucleotide provided herein comprises an antisense strand having the sugar moiety of each of the nucleotides at positions 1, 2, 3, 5, 7, and 14 of the antisense strand modified with 2′-F and the sugar moiety of each of the remaining nucleotides of the antisense strand modified with a modification selected from the group consisting of 2′-O-propargyl, 2′-O-propylamin, 2′-amino, 2′-ethyl, 2′-aminoethyl (EA), 2′-O-methyl (2′-OMe), 2′-O-methoxyethyl (2′-MOE), 2′-O-[2-(methylamino)-2-oxoethyl] (2′-O-NMA), and 2′-deoxy-2′-fluoro-β-d-arabinonucleic acid (2′-FANA).

[0497] In some embodiments, an oligonucleotide provided herein comprises an antisense strand having the sugar moiety of each of the nucleotides at positions 2, 3, 4, 5, 7, and 14 of the antisense strand modified with 2′-F and the sugar moiety of each of the remaining nucleotides of the antisense strand modified with a modification selected from the group consisting of 2′-O-propargyl, 2′-O-propylamin, 2′-amino, 2′-ethyl, 2′-aminoethyl (EA), 2′-O-methyl (2′-OMe), 2′-O-methoxyethyl (2′-MOE), 2′-O-[2-(methylamino)-2-oxoethyl] (2′-O-NMA), and 2′-deoxy-2′-fluoro-β-d-arabinonucleic acid (2′-FANA).

[0498] In some embodiments, an oligonucleotide provided herein comprises an antisense strand having the sugar moiety of each of the nucleotides at positions 1, 2, 3, 5, 10, and 14 of the antisense strand modified with 2′-F and the sugar moiety of each of the remaining nucleotides of the antisense strand modified with a modification selected from the group consisting of 2′-O-propargyl, 2′-O-propylamin, 2′-amino, 2′-ethyl, 2′-aminoethyl (EA), 2′-O-methyl (2′-OMe), 2′-O-methoxyethyl (2′-MOE), 2′-O-[2-(methylamino)-2-oxoethyl] (2′-O-NMA), and 2′-deoxy-2′-fluoro-β-d-arabinonucleic acid (2′-FANA).

[0499] In some embodiments, an oligonucleotide provided herein comprises an antisense strand having the sugar moiety of each of the nucleotides at positions 2, 3, 4, 5, 10, and 14 of the antisense strand modified with 2′-F and the sugar moiety of each of the remaining nucleotides of the antisense strand modified with a modification selected from the group consisting of 2′-O-propargyl, 2′-O-propylamin, 2′-amino, 2′-ethyl, 2′-aminoethyl (EA), 2′-O-methyl (2′-OMe), 2′-O-methoxyethyl (2′-MOE), 2′-O-[2-(methylamino)-2-oxoethyl] (2′-O-NMA), and 2′-deoxy-2′-fluoro-β-d-arabinonucleic acid (2′-FANA).

[0500] In some embodiments, an oligonucleotide provided herein comprises an antisense strand having the sugar moiety of each of the nucleotides at positions 2, 3, 5, 7, 10, and 14 of the antisense strand modified with 2′-F and the sugar moiety of each of the remaining nucleotides of the antisense strand modified with a modification selected from the group consisting of 2′-O-propargyl, 2′-O-propylamin, 2′-amino, 2′-ethyl, 2′-aminoethyl (EA), 2′-O-methyl (2′-OMe), 2′-O-methoxyethyl (2′-MOE), 2′-O-[2-(methylamino)-2-oxoethyl] (2′-O-NMA), and 2′-deoxy-2′-fluoro-β-d-arabinonucleic acid (2′-FANA).

[0501] In some embodiments, an oligonucleotide provided herein comprises an antisense strand having the sugar moiety of each of the nucleotides at positions 2, 3, 4, 5, 7, 10, and 14 of the antisense strand modified with 2′-F and the sugar moiety of each of the remaining nucleotides of the antisense strand modified with a modification selected from the group consisting of 2′-O-propargyl, 2′-O-propylamin, 2′-amino, 2′-ethyl, 2′-aminoethyl (EA), 2′-O-methyl (2′-OMe), 2′-O-methoxyethyl (2′-MOE), 2′-O-[2-(methylamino)-2-oxoethyl] (2′-O-NMA), and 2′-deoxy-2′-fluoro-β-d-arabinonucleic acid (2′-FANA).

[0502] In some embodiments, an oligonucleotide provided herein comprises an antisense strand having the sugar moiety of each of the nucleotides at positions 2, 3, 4, 5, 7, 8, 10, 14, 16 and 19 of the antisense strand modified with 2′-F and the sugar moiety of each of the remaining nucleotides of the antisense strand modified with a modification selected from the group consisting of 2′-O-propargyl, 2′-O-propylamin, 2′-amino, 2′-ethyl, 2′-aminoethyl (EA), 2′-O-methyl (2′-OMe), 2′-O-methoxyethyl (2′-MOE), 2′-O-[2-(methylamino)-2-oxoethyl] (2′-O-NMA), and 2′-deoxy-2′-fluoro-β-d-arabinonucleic acid (2′-FANA).

[0503] In some embodiments, an oligonucleotide provided herein comprises an antisense strand having the sugar moiety at position 1, position 2, position 3, position 4, position 5, position 6, position 7, position 8, position 9, position 10, position 11, position 12, position 13, position 14, position 15, position 16, position 17, position 18, position 19, position 20, position 21, or position 22 modified with 2′-F.

[0504] In some embodiments, an oligonucleotide provided herein comprises an antisense strand having the sugar moiety at position 1, position 2, position 3, position 4, position 5, position 6, position 7, position 8, position 9, position 10, position 11, position 12, position 13, position 14, position 15, position 16, position 17, position 18, position 19, position 20, position 21, or position 22 modified with 2′-OMe.

[0505] In some embodiments, an oligonucleotide provided herein comprises an antisense strand having the sugar moiety at position 1, position 2, position 3, position 4, position 5, position 6, position 7, position 8, position 9, position 10, position 11, position 12, position 13, position 14, position 15, position 16, position 17, position 18, position 19, position 20, position 21, or position 22 modified with a modification selected from the group consisting of 2′-O-propargyl, 2′-O-propylamin, 2′-amino, 2′-ethyl, 2′-aminoethyl (EA), 2′-O-methyl (2′-OMe), 2′-O-methoxyethyl (2′-MOE), 2′-O-[2-(methylamino)-2-oxoethyl] (2′-O-NMA), and 2′-deoxy-2′-fluoro-β-d-arabinonucleic acid (2′-FANA).

[0506] In some embodiments, an oligonucleotide provided herein comprises a sense strand having the sugar moiety at positions 8-11 modified with 2′-F. In some embodiments, an oligonucleotide provided herein comprises a sense strand having the sugar moiety at positions 3, 8, 9, 10, 12, 13 and 17 modified with 2′-F. In some embodiments, an oligonucleotide provided herein comprises a sense strand having the sugar moiety at positions 1-7 and 12-17 or 12-20 modified with 2′OMe. In some embodiments, an oligonucleotide provided herein comprises a sense strand having the sugar moiety of each of the nucleotides at positions 1-7 and 12-17 or 12-20 of the sense strand modified with a modification selected from the group consisting of 2′-O-propargyl, 2′-O-propylamin, 2′-amino, 2′-ethyl, 2′-aminoethyl (EA), 2′-O-methyl (2′-OMe), 2′-O-methoxyethyl (2′-MOE), 2′-O-[2-(methylamino)-2-oxoethyl] (2′-O-NMA), and 2′-deoxy-2′-fluoro-β-d-arabinonucleic acid (2′-FANA). In some embodiments, an oligonucleotide provided herein comprises a sense strand having the sugar moiety at positions 1-2, 4-7, 11, 14-16 and 18-20 modified with 2′OMe. In some embodiments, an oligonucleotide provided herein comprises a sense strand having the sugar moiety of each of the nucleotides at positions 1-2, 4-7, 11, 14-16 and 18-20 of the sense strand modified with a modification selected from the group consisting of 2′-O-propargyl, 2′-O-propylamin, 2′-amino, 2′-ethyl, 2′-aminoethyl (EA), 2′-O-methyl (2′-OMe), 2′-O-methoxyethyl (2′-MOE), 2′-O-[2-(methylamino)-2-oxoethyl] (2′-O-NMA), and 2′-deoxy-2′-fluoro-β-d-arabinonucleic acid (2′-FANA).

[0507] In some embodiments, an oligonucleotide provided herein comprises a sense strand having the sugar moiety at position 1, position 2, position 3, position 4, position 5, position 6, position 7, position 8, position 9, position 10, position 11, position 12, position 13, position 14, position 15, position 16, position 17, position 18, position 19, position 20, position 21, position 22, position 23, position 24, position 25, position 26, position 27, position 28, position 29, position 30, position 31, position 32, position 33, position 34, position 35, or position 36 modified with 2′-F.

[0508] In some embodiments, an oligonucleotide provided herein comprises a sense strand having the sugar moiety at position 1, position 2, position 3, position 4, position 5, position 6, position 7, position 8, position 9, position 10, position 11, position 12, position 13, position 14, position 15, position 16, position 17, position 18, position 19, position 20, position 21, position 22, position 23, position 24, position 25, position 26, position 27, position 28, position 29, position 30, position 31, position 32, position 33, position 34, position 35, or position 36 modified with 2′-OMe.

[0509] In some embodiments, an oligonucleotide provided herein comprises a sense strand having the sugar moiety at position 1, position 2, position 3, position 4, position 5, position 6, position 7, position 8, position 9, position 10, position 11, position 12, position 13, position 14, position 15, position 16, position 17, position 18, position 19, position 20, position 21, position 22, position 23, position 24, position 25, position 26, position 27, position 28, position 29, position 30, position 31, position 32, position 33, position 34, position 35, or position 36 modified with a modification selected from the group consisting of 2′-O-propargyl, 2′-O-propylamin, 2′-amino, 2′-ethyl, 2′-aminoethyl (EA), 2′-O-methyl (2′-OMe), 2′-O-methoxyethyl (2′-MOE), 2′-O-[2-(methylamino)-2-oxoethyl] (2′-O-NMA), and 2′-deoxy-2′-fluoro-β-d-arabinonucleic acid (2′-FANA).

### 5′-Terminal Phosphate

[0510] In some embodiments, an oligonucleotide described herein comprises a 5′-terminal phosphate. In some embodiments, 5′-terminal phosphate groups of an RNAi oligonucleotide enhance the interaction with Ago2. However, oligonucleotides comprising a 5′-phosphate group may be susceptible to degradation via phosphatases or other enzymes, which can limit their bioavailability in vivo. In some embodiments, an oligonucleotide (e.g., a double-stranded oligonucleotide) herein includes analogs of 5′ phosphates that are resistant to such degradation. In some embodiments, the phosphate analog is oxymethylphosphonate, vinylphosphonate or malonylphosphonate, or a combination thereof. In certain embodiments, the 5′ end of an oligonucleotide strand is attached to chemical moiety that mimics the electrostatic and steric properties of a natural 5′-phosphate group (“phosphate mimic”). In some embodiments, the sense and antisense strands of an oligonucleotide comprise nucleotide sequences selected from the group consisting of:
[0511] (a) SEQ ID NOs: 909 and 936, respectively;
[0512] (b) SEQ ID NOs: 894 and 920, respectively;
[0513] (c) SEQ ID NOs: 897 and 923, respectively;
[0514] (d) SEQ ID NOs: 892 and 918, respectively;
[0515] (e) SEQ ID NOs: 891 and 917, respectively; and
[0516] (f) SEQ ID NOs: 887 and 913, respectively;
   wherein the oligonucleotide comprises a 5′-terminal phosphate.

[0517] In some embodiments, an oligonucleotide has a phosphate analog at a 4′-carbon position of the sugar (referred to as a “4′-phosphate analog”). See, e.g., Intl. Patent Application Publication No. WO 2018/045317. In some embodiments, an oligonucleotide herein comprises a 4′-phosphate analog at a 5′-terminal nucleotide. In some embodiments, a phosphate analog is an oxymethylphosphonate, in which the oxygen atom of the oxymethyl group is bound to the sugar moiety (e.g., at its 4′-carbon) or analog thereof. In other embodiments, a 4′-phosphate analog is a thiomethylphosphonate or an aminomethylphosphonate, in which the sulfur atom of the thiomethyl group or the nitrogen atom of the amino methyl group is bound to the 4′-carbon of the sugar moiety or analog thereof. In certain embodiments, a 4′-phosphate analog is an oxymethylphosphonate. In some embodiments, an oxymethylphosphonate is represented by the formula —O—CH₂—PO(OH)₂, —O—CH₂—PO(OR)₂, or —O—CH₂—POOH(R), in which R is independently selected from H, CH₃, an alkyl group, CH₂CH₂CN, CH₂OCOC(CH₃)₃, CH₂OCH₂CH₂Si(CH₃)₃ or a protecting group. In certain embodiments, the alkyl group is CH₂CH₃. More typically, R is independently selected from H, CH₃ or CH₂CH₃. In some embodiment, R is CH₃. In some embodiments, the 4′-phosphate analog is 5′-methoxyphosphonate-4′-oxy.

[0518] In some embodiments, a dsRNAi oligonucleotide provided herein comprises an antisense strand comprising a 4′-phosphate analog at the 5′-terminal nucleotide, wherein 5′-terminal nucleotide comprises the following structure:

[chemical structure]

### 5′-methoxyphosphonate-4′-oxy-2′-O-methyluridine [MePhosphonate-40-mUs] phosphorothioate

### Modified Internucleotide Linkage

[0519] In some embodiments, an oligonucleotide (e.g., a dsRNAi oligonucleotide) herein comprises a modified internucleotide linkage. In some embodiments, phosphate modifications or substitutions result in an oligonucleotide that comprises at least about 1 (e.g., at least 1, at least 2, at least 3 or at least 5) modified internucleotide linkage. In some embodiments, any one of the oligonucleotides disclosed herein comprises about 1 to about 10 (e.g., 1 to 10, 2 to 8, 4 to 6, 3 to 10, 5 to 10, 1 to 5, 1 to 3 or 1 to 2) modified internucleotide linkages. In some embodiments, any one of the oligonucleotides disclosed herein comprises 1, 2, 3, 4, 5, 6, 7, 8, 9 or 10 modified internucleotide linkages.

[0520] A modified internucleotide linkage may be a phosphorodithioate linkage, a phosphorothioate linkage, a phosphotriester linkage, a thionoalkylphosphonate linkage, a thionalkylphosphotriester linkage, a phosphoramidite linkage, a phosphonate linkage or a boranophosphate linkage. In some embodiments, at least one modified internucleotide linkage of any one of the oligonucleotides as disclosed herein is a phosphorothioate linkage.

[0521] In some embodiments, an oligonucleotide provided herein (e.g., a dsRNAi oligonucleotide) has a phosphorothioate linkage between one or more of positions 1 and 2 of the sense strand, positions 1 and 2 of the antisense strand, positions 2 and 3 of the antisense strand, positions 3 and 4 of the antisense strand, positions 20 and 21 of the antisense strand, and positions 21 and 22 of the antisense strand. In some embodiments, the oligonucleotide described herein has a phosphorothioate linkage between each of positions 1 and 2 of the sense strand, positions 1 and 2 of the antisense strand, positions 2 and 3 of the antisense strand, positions 20 and 21 of the antisense strand, and positions 21 and 22 of the antisense strand. In some embodiments, the sense and antisense strands of an oligonucleotide comprise nucleotide sequences selected from the group consisting of:
[0522] (a) SEQ ID NOs: 909 and 936, respectively;
[0523] (b) SEQ ID NOs: 894 and 920, respectively;
[0524] (c) SEQ ID NOs: 897 and 923, respectively;
[0525] (d) SEQ ID NOs: 892 and 918, respectively;
[0526] (e) SEQ ID NOs: 891 and 917, respectively; and
[0527] (f) SEQ ID NOs: 887 and 913, respectively;
   wherein the oligonucleotide comprises a modified internucleotide linkage. In some embodiments, the sense and antisense strands of an oligonucleotide comprise nucleotide sequences selected from the group consisting of:
[0528] (a) SEQ ID NOs: 909 and 936, respectively;
[0529] (b) SEQ ID NOs: 894 and 920, respectively;
[0530] (c) SEQ ID NOs: 897 and 923, respectively;
[0531] (d) SEQ ID NOs: 892 and 918, respectively;
[0532] (e) SEQ ID NOs: 891 and 917, respectively; and,
[0533] (f) SEQ ID NOs: 887 and 913, respectively;
   wherein the oligonucleotide comprises a phosphorothioate linkage between one or more of positions 1 and 2 of the sense strand, positions 1 and 2 of the antisense strand, positions 2 and 3 of the antisense strand, positions 3 and 4 of the antisense strand, positions 20 and 21 of the antisense strand, and positions 21 and 22 of the antisense strand. In some embodiments, the sense and antisense strands of an oligonucleotide comprise nucleotide sequences selected from the group consisting of:
[0534] (a) SEQ ID NOs: 909 and 936, respectively;
[0535] (b) SEQ ID NOs: 894 and 920, respectively;
[0536] (c) SEQ ID NOs: 897 and 923, respectively;
[0537] (d) SEQ ID NOs: 892 and 918, respectively;
[0538] (e) SEQ ID NOs: 891 and 917, respectively; and
[0539] (f) SEQ ID NOs: 887 and 913, respectively;
   wherein the oligonucleotide comprises a phosphorothioate linkage between each of positions 1 and 2 of the sense strand, positions 1 and 2 of the antisense strand, positions 2 and 3 of the antisense strand, positions 20 and 21 of the antisense strand, and positions 21 and 22 of the antisense strand.

### Base Modifications

[0540] In some embodiments, oligonucleotides herein (e.g., dsRNAi oligonucleotides) have one or more modified nucleobases. In some embodiments, modified nucleobases (also referred to herein as base analogs) are linked at the 1′ position of a nucleotide sugar moiety. In certain embodiments, a modified nucleobase is a nitrogenous base. In certain embodiments, a modified nucleobase does not contain nitrogen atom. See, e.g., US Patent Application Publication No. 2008/0274462. In some embodiments, a modified nucleotide comprises a universal base. In some embodiments, a modified nucleotide does not contain a nucleobase (abasic). In some embodiments, the sense and antisense strands of an oligonucleotide comprise nucleotide sequences selected from the group consisting of:
[0541] (a) SEQ ID NOs: 909 and 936, respectively;
[0542] (b) SEQ ID NOs: 894 and 920, respectively;
[0543] (c) SEQ ID NOs: 897 and 923, respectively;
[0544] (d) SEQ ID NOs: 892 and 918, respectively;
[0545] (e) SEQ ID NOs: 891 and 917, respectively; and
[0546] (f) SEQ ID NOs: 887 and 913, respectively;
   wherein the oligonucleotide comprises one or more modified nucleobases.

[0547] In some embodiments, a universal base is a heterocyclic moiety located at the 1′ position of a nucleotide sugar moiety in a modified nucleotide, or the equivalent position in a nucleotide sugar moiety substitution, that, when present in a duplex, can be positioned opposite more than one type of base without substantially altering structure of the duplex. In some embodiments, compared to a reference single-stranded nucleic acid (e.g., oligonucleotide) that is fully complementary to a target nucleic acid, a single-stranded nucleic acid containing a universal base forms a duplex with the target nucleic acid that has a lower Tₘ than a duplex formed with the complementary nucleic acid. In some embodiments, when compared to a reference single-stranded nucleic acid in which the universal base has been replaced with a base to generate a single mismatch, the single-stranded nucleic acid containing the universal base forms a duplex with the target nucleic acid that has a higher Tₘ than a duplex formed with the nucleic acid comprising the mismatched base.

[0548] Non-limiting examples of universal-binding nucleotides include, but are not limited to, inosine, 1-β-D-ribofuranosyl-5-nitroindole and/or 1-β-D-ribofuranosyl-3-nitropyrrole (see, US Patent Application Publication No. 2007/0254362; Van Aerschot et al. (1995) NUCLEIC ACIDS RES. 23:4363-4370; Loakes et al. (1995) NUCLEIC ACIDS RES. 23:2361-66; and Loakes & Brown (1994) NUCLEIC ACIDS RES. 22:4039-43).

### Targeting Ligands

[0549] In some embodiments, it is desirable to target the oligonucleotides of the disclosure (e.g., dsRNAi oligonucleotides) to one or more cells or one or more organs. Such a strategy can help to avoid undesirable effects in other organs or avoid undue loss of the oligonucleotide to cells, tissue or organs that would not benefit from the oligonucleotide. Accordingly, in some embodiments, oligonucleotides disclosed herein (e.g., dsRNAi oligonucleotides) are modified to facilitate targeting and/or delivery to a particular tissue, cell, or organ (e.g., to facilitate delivery of the oligonucleotide to the liver). In some embodiments, an oligonucleotide comprises at least one nucleotide (e.g., 1, 2, 3, 4, 5, 6 or more nucleotides) conjugated to one or more targeting ligand(s). In some embodiments, the sense and antisense strands of an oligonucleotide comprise nucleotide sequences selected from the group consisting of:
[0550] (a) SEQ ID NOs: 909 and 936, respectively;
[0551] (b) SEQ ID NOs: 894 and 920, respectively;
[0552] (c) SEQ ID NOs: 897 and 923, respectively;
[0553] (d) SEQ ID NOs: 892 and 918, respectively;
[0554] (e) SEQ ID NOs: 891 and 917, respectively; and
[0555] (f) SEQ ID NOs: 887 and 913, respectively;
   wherein the oligonucleotide comprises a targeting ligand conjugated to at least once nucleotide,

[0556] In some embodiments, the targeting ligand comprises a carbohydrate, amino sugar, cholesterol, peptide, polypeptide, protein, or part of a protein (e.g., an antibody or antibody fragment), or lipid. In some embodiments, the targeting ligand is an aptamer. For example, a targeting ligand may be an RGD peptide that is used to target tumor vasculature or glioma cells, CREKA peptide to target tumor vasculature or stoma, transferring, lactoferrin, or an aptamer to target transferrin receptors expressed on CNS vasculature, or an anti-EGFR antibody to target EGFR on glioma cells. In certain embodiments, the targeting ligand is one or more GalNAc moieties.

[0557] In some embodiments, 1 or more (e.g., 1, 2, 3, 4, 5 or 6) nucleotides of an oligonucleotide are each conjugated to a separate targeting ligand. In some embodiments, 2 to 4 nucleotides of an oligonucleotide are each conjugated to a separate targeting ligand. In some embodiments, targeting ligands are conjugated to 2 to 4 nucleotides at either ends of the sense or antisense strand (e.g., targeting ligands are conjugated to a 2 to 4 nucleotide overhang or extension on the 5′ or 3′ end of the sense or antisense strand) such that the targeting ligands resemble bristles of a toothbrush and the oligonucleotide resembles a toothbrush. For example, an oligonucleotide may comprise a stem-loop at either the 5′ or 3′ end of the sense strand and 1, 2, 3 or 4 nucleotides of the loop of the stem may be individually conjugated to a targeting ligand. In some embodiments, an oligonucleotide (e.g., a dsRNAi oligonucleotide) provided by the disclosure comprises a stem-loop at the 3′ end of the sense strand, wherein the loop of the stem-loop comprises a triloop or a tetraloop, and wherein the 3 or 4 nucleotides comprising the triloop or tetraloop, respectively, are individually conjugated to a targeting ligand.

[0558] GalNAc is a high affinity ligand for the ASGPR, which is primarily expressed on the sinusoidal surface of hepatocyte cells and has a major role in binding, internalizing and subsequent clearing circulating glycoproteins that contain terminal galactose or GalNAc residues (asialoglycoproteins). Conjugation (either indirect or direct) of GalNAc moieties to oligonucleotides of the instant disclosure can be used to target these oligonucleotides to the ASGPR expressed on cells. In some embodiments, an oligonucleotide of the instant disclosure is conjugated to at least one or more GalNAc moieties, wherein the GalNAc moieties target the oligonucleotide to an ASGPR expressed on human liver cells (e.g., human hepatocytes). In some embodiments, the GalNAc moiety targets the oligonucleotide to the liver.

[0559] In some embodiments, an oligonucleotide of the instant disclosure is conjugated directly or indirectly to a monovalent GalNAc. In some embodiments, the oligonucleotide is conjugated directly or indirectly to more than one monovalent GalNAc (i.e., is conjugated to 2, 3 or 4 monovalent GalNAc moieties, and is typically conjugated to 3 or 4 monovalent GalNAc moieties). In some embodiments, an oligonucleotide is conjugated to one or more bivalent GalNAc, trivalent GalNAc or tetravalent GalNAc moieties.

[0560] In some embodiments, 1 or more (e.g., 1, 2, 3, 4, 5 or 6) nucleotides of an oligonucleotide are each conjugated to a GalNAc moiety. In some embodiments, 2 to 4 nucleotides of a tetraloop are each conjugated to a separate GalNAc. In some embodiments, 1 to 3 nucleotides of a triloop are each conjugated to a separate GalNAc. In some embodiments, targeting ligands are conjugated to 2 to 4 nucleotides at either ends of the sense or antisense strand (e.g., ligands are conjugated to a 2 to 4 nucleotide overhang or extension on the 5′ or 3′ end of the sense or antisense strand) such that the GalNAc moieties resemble bristles of a toothbrush and the oligonucleotide resembles a toothbrush. In some embodiments, GalNAc moieties are conjugated to a nucleotide of the sense strand. For example, three (3) or four (4) GalNAc moieties can be conjugated to nucleotides in the tetraloop of the sense strand where each GalNAc moiety is conjugated to 1 nucleotide.

[0561] In some embodiments, the tetraloop is any combination of adenine and guanine nucleotides.

[0562] In some embodiments, the tetraloop (L) has a monovalent GalNAc moiety attached to any one or more guanine nucleotides of the tetraloop via any linker described herein, as depicted below (X=heteroatom):

[chemical structure]

[0563] In some embodiments, the tetraloop (L) has a monovalent GalNAc attached to any one or more adenine nucleotides of the tetraloop via any linker described herein, as depicted 5 below (X=heteroatom):

[chemical structure]

[0564] In some embodiments, an oligonucleotide herein comprises a monovalent GalNAc 10 attached to a guanine nucleotide referred to as [ademG-GalNAc] or 2′-aminodiethoxymethanol-Guanine-GalNAc, as depicted below:

[chemical structure]

[0565] In some embodiments, an oligonucleotide herein comprises a monovalent GalNAc attached to an adenine nucleotide, referred to as [ademA-GalNAc] or 2′-aminodiethoxymethanol-Adenine-GalNAc, as depicted below:

[chemical structure]

[0566] An example of such conjugation is shown below for a loop comprising from 5′ to 3′ the nucleotide sequence GAAA (L=linker, X=heteroatom). Such a loop may be present, for example, at positions 27-30 of a sense strand provided herein, as shown in FIGS. 2 and 4A.

[chemical structure]

[0567] In the chemical formula, is used to describe an attachment point to the oligonucleotide strand.

[chemical structure]

[0568] Appropriate methods or chemistry (e.g., click chemistry) can be used to link a targeting ligand to a nucleotide. In some embodiments, a targeting ligand is conjugated to a nucleotide using a click linker. In some embodiments, an acetal-based linker is used to conjugate a targeting ligand to a nucleotide of any one of the oligonucleotides described herein. Acetal-based linkers are disclosed, for example, in Intl. Patent Application Publication No. WO 2016/100401. In some embodiments, the linker is a labile linker. However, in other embodiments, the linker is stable. Examples are shown below for a loop comprising from 5′ to 3′ the nucleotides GAAA, in which GalNAc moieties are attached to nucleotides of the loop using an acetal linker. Such a loop may be present, for example, at positions 27-30 of the sense strand as shown in FIGS. 2 and 4A. In the chemical formula,

[chemical structure]

is an attachment point to the oligonucleotide strand.

[chemical structure]

[chemical structure]

[0569] As mentioned, various appropriate methods or chemistry synthetic techniques (e.g., click chemistry) can be used to link a targeting ligand to a nucleotide. In some embodiments, a targeting ligand is conjugated to a nucleotide using a click linker. In some embodiments, an acetal-based linker is used to conjugate a targeting ligand to a nucleotide of any one of the oligonucleotides described herein. Acetal-based linkers are disclosed, for example, in Intl. Patent Application Publication No. WO 2016/100401. In some embodiments, the linker is a labile linker. However, in other embodiments, the linker is a stable linker.

[0570] In some embodiments, a duplex extension (e.g., of up to 3, 4, 5 or 6 bp in length) is provided between a targeting ligand (e.g., a GalNAc moiety) and a dsRNA. In some embodiments, the oligonucleotides herein (e.g., dsRNAi oligonucleotides) do not have a GalNAc conjugated thereto.

[0571] In some embodiments, the sense and antisense strands of an oligonucleotide comprise nucleotide sequences selected from the group consisting of:
[0572] (a) SEQ ID NOs: 909 and 936, respectively;
[0573] (b) SEQ ID NOs: 894 and 920, respectively;
[0574] (c) SEQ ID NOs: 897 and 923, respectively;
[0575] (d) SEQ ID NOs: 892 and 918, respectively;
[0576] (e) SEQ ID NOs: 891 and 917, respectively; and
[0577] (f) SEQ ID NOs: 887 and 913, respectively;
   wherein the oligonucleotide comprises at least one GalNAc moiety conjugated to a nucleotide.
   Exemplary KHK-Targeting dsRNAi Oligonucleotides

[0578] In some embodiments, the disclosure provides dsRNAi oligonucleotides that target KHK mRNA and reduce KHK expression (referred to herein as KHK-targeting dsRNAi oligonucleotides), wherein the oligonucleotides comprise a sense strand and an antisense strand that form a duplex region, and wherein the antisense strand comprises a region of complementarity to KHK mRNA target sequence of any one of SEQ ID NOs: 4-387, and wherein the region of complementarity is at least 15 contiguous nucleotides in length. In some embodiments, the disclosure provides dsRNAi oligonucleotides that target KHK mRNA and reduce KHK expression (referred to herein as KHK-targeting dsRNAi oligonucleotides), wherein the oligonucleotides comprise a sense strand and an antisense strand that form a duplex region, and wherein the antisense strand comprises a region of complementarity to KHK mRNA target sequence of nucleotides 1-19 of any one of SEQ ID NOs: 4-387, and wherein the region of complementarity is at least 15 contiguous nucleotides in length. In some embodiments, the region of complementarity is 15-20 nucleotides in length. In some embodiments, the region of complementarity is 15 nucleotides, 16 nucleotides, 17 nucleotides, 18 nucleotides, 19 nucleotides, or 20 nucleotides in length. In some embodiments, the region of complementarity is at least 19 contiguous nucleotides in length. In some embodiments, the region of complementarity is at least 20 nucleotides in length. In some embodiments, the region of complementarity is 19 nucleotides in length. In some embodiments, the region of complementarity is 20 nucleotides in length.

[0579] In some embodiments, the sense strand is 15 to 50 nucleotides in length. In some embodiments, the sense strand is 18 to 36 nucleotides in length. In some embodiments, the sense strand comprises a nucleotide sequence selected from SEQ ID NOs: 909, 894, 897, 892, 891 and 887, and is 15 to 50 nucleotides in length. In some embodiments, the sense strand is 36 nucleotides in length. In some embodiments, the antisense strand is 15 to 30 nucleotides in length. In some embodiments, the antisense strand comprises a nucleotide sequence selected from SEQ ID NOs: 936, 920, 923, 917, 918 and 913, and is 15 to 50 nucleotides in length. In some embodiments, the antisense strand is 22 nucleotides in length. In some embodiments, the sense strand is 36 nucleotides in length and the antisense strand is 22 nucleotides in length and the sense and antisense strand form a duplex region that is at least 19 nucleotides in length. In some embodiments, the duplex region is 20 nucleotides in length.

[0580] In some embodiments, the KHK-targeting dsRNAi oligonucleotides for reducing KHK expression provided by the disclosure comprise a stem-loop set forth as S1-L-S2, wherein S1 is complementary to S2, and wherein L forms a loop between S1 and S2 of 3-5 nucleotides in length. In some embodiments, S1 and S2 are 1-10 nucleotides in length and are the same length. In some embodiments, S1 and S2 are 1 nucleotide, 2 nucleotides, 3 nucleotides, 4 nucleotides, 5 nucleotides, 6 nucleotides, 7 nucleotides, 8 nucleotides, 9 nucleotides, or 10 nucleotides in length. In some embodiments, S1 and S2 are 6 nucleotides in length. In some embodiments the loop is 3 nucleotides in length. In some embodiments, the loop is 4 nucleotides in length. In some embodiments, the loop is 5 nucleotides in length. In some embodiments, L is a triloop or a tetraloop. In some embodiments, L is a triloop. In some embodiments, L is a tetraloop. In some embodiments, the tetraloop comprises the sequence 5′-GAAA-3′. In some embodiments, the stem loop comprises the sequence 5′-GCAGCCGAAAGGCUGC-3′ (SEQ ID NO: 871). In some embodiments, up to 4 nucleotides comprising L are each conjugated to a targeting ligand. In some embodiments, 1 nucleotide, 2 nucleotides, 3 nucleotides, or 4 nucleotides comprising L are each conjugated to a targeting ligand. In some embodiments, 3 nucleotides comprising L are each conjugated to a targeting ligand. In some embodiments, L is a tetraloop comprising the sequence 5′-GAAA-3′, wherein each adenosine (A) nucleoside comprising the tetraloop is conjugated to a targeting ligand comprising a monovalent N-acetylgalactosamine (GalNAc) moiety.

[0581] In some embodiments, the antisense strand comprises a 3′ overhang of one or more nucleotides in length. In some embodiments, the 3′ overhang is two (2) nucleotides in length. In some embodiments, the sequence of the 3′ overhang is 5′-GG-3′.

[0582] In some embodiments, the KHK-targeting dsRNAi oligonucleotides for reducing KHK expression provided by the disclosure comprise a sense strand of 36 nucleotides in length and an antisense strand of 22 nucleotides in length, wherein the sense strand and the antisense strand form a duplex region of at least 19 nucleotides in length, optionally 20 nucleotides in length, wherein the 3′ end of the sense strand comprises a stem-loop set forth as S1-L-S2, wherein S1 is complementary to S2, and wherein L forms a loop between S1 and S2 of 3-5 nucleotides in length, wherein the antisense strand comprises a region of complementarity to a KHK mRNA target sequence of any one of SEQ ID NOs: 4-387, and wherein the region of complementarity is 19 contiguous nucleotides in length, optionally 20 nucleotides in length. In some embodiments, the KHK-targeting dsRNAi oligonucleotides for reducing KHK expression provided by the disclosure comprise a sense strand of 36 nucleotides in length and an antisense strand of 22 nucleotides in length, wherein the sense strand and the antisense strand form a duplex region of at least 19 nucleotides in length, optionally 20 nucleotides in length, wherein the 3′ end of the sense strand comprises a stem-loop set forth as S1-L-S2, wherein S1 is complementary to S2, and wherein L forms a loop between S1 and S2 of 3-5 nucleotides in length, wherein the antisense strand comprises a region of complementarity to a KHK mRNA target sequence of nucleotides 1-19 of any one of SEQ ID NOs: 4-387, and wherein the region of complementarity is 19 contiguous nucleotides in length, optionally 20 nucleotides in length.

[0583] In some embodiments, the KHK-targeting dsRNAi oligonucleotides for reducing KHK expression provided by the disclosure comprises at least one modified nucleotide. In some embodiments, the modified nucleotide comprises a five (5) carbon sugar (e.g., ribose) with a 2′-modification. In some embodiments, the 2′-modification is a modification selected from 2′-aminoethyl, 2′-fluoro, 2′-O-methyl, 2′-O-methoxyethyl, and 2′-deoxy-2′-fluoro-β-d-arabinonucleic acid. In some embodiments, the 2′-modification is 2′-fluoro or 2′-O-methyl. In some embodiments, all nucleotides comprising the KHK-targeting dsRNAi oligonucleotides are modified. In some embodiments, all nucleotides comprising the KHK-targeting dsRNAi oligonucleotides are modified with a 2′-modification selected from 2′-fluoro and 2′-O-methyl. In some embodiments, all nucleotides comprising the KHK-targeting dsRNAi oligonucleotides are modified with a combination of 2′-fluoro and 2′-O-methyl. In some embodiments, the sense and antisense strand of an oligonucleotide comprise nucleotide sequences selected from the group consisting of:
[0584] (a) SEQ ID NOs: 909 and 936, respectively;
[0585] (b) SEQ ID NOs: 894 and 920, respectively;
[0586] (c) SEQ ID NOs: 897 and 923, respectively;
[0587] (d) SEQ ID NOs: 892 and 918, respectively;
[0588] (e) SEQ ID NOs: 891 and 917, respectively; and
[0589] (f) SEQ ID NOs: 887 and 913, respectively;
   wherein the oligonucleotide is modified with a combination of 2′-fluoro and 2′-O-methyl.

[0590] In some embodiments, the KHK-targeting dsRNAi oligonucleotides comprises at least one modified internucleotide linkage. In some embodiments, the at least one modified internucleotide linkage is a phosphorothioate linkage.

[0591] In some embodiments, the KHK-targeting dsRNAi oligonucleotides comprise an antisense strand wherein the 4′-carbon of the sugar of the 5′-terminal nucleotide of the antisense strand comprises a phosphate analog. In some embodiments, the phosphate analog is oxymethylphosphonate, vinylphosphonate or malonylphosphonate. In some embodiments, the phosphate analog is a 4′-phosphate analog comprising 5′-methoxyphosphonate-4′-oxy.

[0592] In some embodiments, the KHK-targeting dsRNAi oligonucleotides for reducing KHK expression provided by the disclosure comprise a sense strand and an antisense strand, wherein all nucleotides comprising the sense strand and antisense strand are modified, wherein the antisense strand comprises a region of complementarity to a KHK mRNA target sequence of any one of SEQ ID NOs: 4-387, and wherein the region of complementarity is at least 15 contiguous nucleotides in length. In some embodiments, the KHK-targeting dsRNAi oligonucleotides for reducing KHK expression provided by the disclosure comprise a sense strand and an antisense strand, wherein all nucleotides comprising the sense strand and antisense strand are modified, wherein the antisense strand comprises a region of complementarity to a KHK mRNA target sequence of nucleotides 1-19 of any one of SEQ ID NOs: 4-387, and wherein the region of complementarity is at least 15 contiguous nucleotides in length. In some embodiments, the 5′-terminal nucleotide of the antisense strand comprises 5′-methoxyphosphonate-4′-oxy-2′-O-methyluridine [MePhosphonate-40-mU], as described herein. In some embodiments, the 5′-terminal nucleotide of the antisense strand comprises a phosphorothioate linkage. In some embodiments, the antisense strand and the sense strand comprise one or more 2′-fluoro (2′-F) and 2′-O-methyl (2′-OMe) modified nucleotides and at least one phosphorothioate linkage. In some embodiments, the antisense strand comprises four (4) phosphorothioate linkages and the sense strand comprises one (1) phosphorothioate linkage. In some embodiments, the antisense strand comprises five (5) phosphorothioate linkages and the sense strand comprises one (1) phosphorothioate linkage.

[0593] In some embodiments, the KHK-targeting dsRNAi oligonucleotides for reducing KHK expression comprise:
[0594] a sense strand comprising a 2′-F modified nucleotide at positions 8-11, a 2′-OMe modified nucleotide at positions 1-7, 12-27, and 31-36, a GalNAc-conjugated nucleotide at position 28, 29 and 30; and a phosphorothioate linkage between positions 1 and 2;
[0595] an antisense strand comprising a 2′-F modified nucleotide at positions 2, 3, 4, 5, 7, 10 and 14, a 2′-OMe at positions 1, 6, 8, 9, 11-13, and 15-22, a phosphorothioate linkage between positions 1 and 2, positions 2 and 3, positions 3 and 4, positions 20 and 21, and positions 21 and 22, and a 5′-terminal nucleotide at position 1 comprising a 4′-phosphate analog, optionally wherein the 5′-terminal nucleotide comprises 5′-methoxyphosphonate-4′-oxy-2′-O-methyluridine [MePhosphonate-40-mU]; wherein positions 1-20 of the antisense strand form a duplex region with positions 1-20 of the sense strand, wherein positions 21-36 of the sense strand form a stem-loop, wherein positions 27-30 form the loop of the stem-loop, optionally wherein positions 27-30 comprise a tetraloop, wherein positions 21 and 22 of the antisense strand comprise an overhang, and wherein the sense strand and antisense strands comprise nucleotide sequences selected from the group consisting of:
[0596] (a) SEQ ID NOs: 886 and 912, respectively;
[0597] (b) SEQ ID NOs: 887 and 913, respectively;
[0598] (c) SEQ ID NOs: 910 and 937, respectively;
[0599] (d) SEQ ID NOs: 888 and 914, respectively;
[0600] (e) SEQ ID NOs: 889 and 915, respectively;
[0601] (f) SEQ ID NOs: 890 and 916, respectively;
[0602] (g) SEQ ID NOs: 891 and 917, respectively;
[0603] (h) SEQ ID NOs: 877 and 884, respectively;
[0604] (i) SEQ ID NOs: 878 and 930, respectively;
[0605] (j) SEQ ID NOs: 876 and 883, respectively;
[0606] (k) SEQ ID NOs: 875 and 882, respectively;
[0607] (l) SEQ ID NOs: 892 and 918, respectively;
[0608] (m) SEQ ID NOs: 893 and 919, respectively;
[0609] (n) SEQ ID NOs: 894 and 920, respectively;
[0610] (o) SEQ ID NOs: 904 and 931, respectively;
[0611] (p) SEQ ID NOs: 895 and 921, respectively;
[0612] (q) SEQ ID NOs: 905 and 932, respectively;
[0613] (r) SEQ ID NOs: 896 and 922, respectively;
[0614] (s) SEQ ID NOs: 911 and 938, respectively;
[0615] (t) SEQ ID NOs: 906 and 933, respectively;
[0616] (u) SEQ ID NOs: 897 and 923, respectively;
[0617] (v) SEQ ID NOs: 907 and 934, respectively;
[0618] (w) SEQ ID NOs: 908 and 935, respectively;
[0619] (x) SEQ ID NOs: 903 and 929, respectively;
[0620] (y) SEQ ID NOs: 901 and 927, respectively;
[0621] (z) SEQ ID NOs: 874 and 881, respectively;
[0622] (aa) SEQ ID NOs: 902 and 928, respectively;
[0623] (bb) SEQ ID NOs: 873 and 880, respectively;
[0624] (cc) SEQ ID NOs: 872 and 879, respectively;
[0625] (dd SEQ ID NOs: 898 and 924, respectively;
[0626] (ee) SEQ ID NOs: 899 and 925, respectively
[0627] (ff) SEQ ID NOs: 900 and 926, respectively; and
[0628] (gg) SEQ ID NOs: 909 and 936, respectively.

[0629] In some embodiments, the KHK-targeting dsRNAi oligonucleotides for reducing KHK expression comprise:
[0630] a sense strand comprising a 2′-F modified nucleotide at positions 8-11, a 2′-OMe modified nucleotide at positions 1-7, 12-27, and 31-36, a GalNAc-conjugated nucleotide at position 28, 29 and 30; and a phosphorothioate linkage between positions 1 and 2;
[0631] an antisense strand comprising a 2′-F modified nucleotide at positions 2, 3, 4, 5, 7, 10 and 14, a 2′-OMe at positions 1, 6, 8, 9, 11-13, and 15-22, a phosphorothioate linkage between positions 1 and 2, positions 2 and 3, positions 20 and 21, and positions 21 and 22, and a 5′-terminal nucleotide at position 1 comprising a 4′-phosphate analog, optionally wherein the 5′-terminal nucleotide comprises 5′-methoxyphosphonate-4′-oxy-2′-O-methyluridine [MePhosphonate-40-mU]; wherein positions 1-20 of the antisense strand form a duplex region with positions 1-20 of the sense strand, wherein positions 21-36 of the sense strand form a stem-loop, wherein positions 27-30 form the loop of the stem-loop, optionally wherein positions 27-30 comprise a tetraloop, wherein positions 21 and 22 of the antisense strand comprise an overhang, and wherein the sense strand and antisense strands comprise nucleotide sequences selected from the group consisting of:
[0632] (a) SEQ ID NOs: 886 and 912, respectively;
[0633] (b) SEQ ID NOs: 887 and 913, respectively;
[0634] (c) SEQ ID NOs: 910 and 937, respectively;
[0635] (d) SEQ ID NOs: 888 and 914, respectively;
[0636] (e) SEQ ID NOs: 889 and 915, respectively;
[0637] (f) SEQ ID NOs: 890 and 916, respectively;
[0638] (g) SEQ ID NOs: 891 and 917, respectively;
[0639] (h) SEQ ID NOs: 877 and 884, respectively;
[0640] (i) SEQ ID NOs: 878 and 930, respectively;
[0641] (j) SEQ ID NOs: 876 and 883, respectively;
[0642] (k) SEQ ID NOs: 875 and 882, respectively;
[0643] (l) SEQ ID NOs: 892 and 918, respectively;
[0644] (m) SEQ ID NOs: 893 and 919, respectively;
[0645] (n) SEQ ID NOs: 894 and 920, respectively;
[0646] (o) SEQ ID NOs: 904 and 931, respectively;
[0647] (p) SEQ ID NOs: 895 and 921, respectively;
[0648] (q) SEQ ID NOs: 905 and 932, respectively;
[0649] (r) SEQ ID NOs: 896 and 922, respectively;
[0650] (s) SEQ ID NOs: 911 and 938, respectively;
[0651] (t) SEQ ID NOs: 906 and 933, respectively;
[0652] (u) SEQ ID NOs: 897 and 923, respectively;
[0653] (v) SEQ ID NOs: 907 and 934, respectively;
[0654] (w) SEQ ID NOs: 908 and 935, respectively;
[0655] (x) SEQ ID NOs: 903 and 929, respectively;
[0656] (y) SEQ ID NOs: 901 and 927, respectively;
[0657] (z) SEQ ID NOs: 874 and 881, respectively;
[0658] (aa) SEQ ID NOs: 902 and 928, respectively;
[0659] (bb) SEQ ID NOs: 873 and 880, respectively;
[0660] (cc) SEQ ID NOs: 872 and 879, respectively;
[0661] (dd) SEQ ID NOs: 898 and 924, respectively;
[0662] (ee) SEQ ID NOs: 899 and 925, respectively
[0663] (ff) SEQ ID NOs: 900 and 926, respectively; and
[0664] (gg) SEQ ID NOs: 909 and 936, respectively

[0665] In some embodiments, a KHK-targeting dsRNAi oligonucleotide for reducing KHK expression provided by the disclosure comprises a sense strand comprising the nucleotide sequence as set forth in SEQ ID NO: 887 and an antisense strand comprising the nucleotide sequence as set forth in SEQ ID NO: 913. In some embodiments, a KHK-targeting dsRNAi oligonucleotide for reducing KHK expression provided by the disclosure comprises a sense strand comprising the nucleotide sequence as set forth in SEQ ID NO: 891 and an antisense strand comprising the nucleotide sequence as set forth in SEQ ID NO: 917. In some embodiments, a KHK-targeting dsRNAi oligonucleotide for reducing KHK expression provided by the disclosure comprises a sense strand comprising the nucleotide sequence as set forth in SEQ ID NO: 892 and an antisense strand comprising the nucleotide sequence as set forth in SEQ ID NO: 918. In some embodiments, a KHK-targeting dsRNAi oligonucleotide for reducing KHK expression provided by the disclosure comprises a sense strand comprising the nucleotide sequence as set forth in SEQ ID NO: 894 and an antisense strand comprising the nucleotide sequence as set forth in SEQ ID NO: 920. In some embodiments, a KHK-targeting dsRNAi oligonucleotide for reducing KHK expression provided by the disclosure comprises a sense strand comprising the nucleotide sequence as set forth in SEQ ID NO: 897 and an antisense strand comprising the nucleotide sequence as set forth in SEQ ID NO: 923. In some embodiments, a KHK-targeting dsRNAi oligonucleotide for reducing KHK expression provided by the disclosure comprises a sense strand comprising the nucleotide sequence as set forth in SEQ ID NO: 909 and an antisense strand comprising the nucleotide sequence as set forth in SEQ ID NO: 936.

[0666] In some embodiments, a KHK-targeting dsRNAi oligonucleotide for reducing KHK expression comprises (i) an antisense strand of 19-30 nucleotides in length, wherein the antisense strand comprises a nucleotide sequence comprising a region of complementarity to a KHK mRNA target sequence, wherein the region of complementarity is set forth in SEQ ID NO: 948; and (ii) a sense strand of 19-50 nucleotides in length comprising a region of complementarity to the antisense strand, wherein the antisense and sense strands are separate strands which form an asymmetric duplex region having an overhang of 1-4 nucleotides at the 3′ terminus of the antisense strand.

[0667] In some embodiments, a KHK-targeting dsRNAi oligonucleotide for reducing KHK expression comprises (i) an antisense strand of 19-30 nucleotides in length, wherein the antisense strand comprises a nucleotide sequence comprising a region of complementarity to a KHK mRNA target sequence, wherein the region of complementarity is set forth in SEQ ID NO: 949; and (ii) a sense strand of 19-50 nucleotides in length comprising a region of complementarity to the antisense strand, wherein the antisense and sense strands are separate strands which form an asymmetric duplex region having an overhang of 1-4 nucleotides at the 3′ terminus of the antisense strand.

[0668] In some embodiments, a KHK-targeting dsRNAi oligonucleotide for reducing KHK expression comprises (i) an antisense strand of 19-30 nucleotides in length, wherein the antisense strand comprises a nucleotide sequence comprising a region of complementarity to a KHK mRNA target sequence, wherein the region of complementarity is set forth in SEQ ID NO: 950; and (ii) a sense strand of 19-50 nucleotides in length comprising a region of complementarity to the antisense strand, wherein the antisense and sense strands are separate strands which form an asymmetric duplex region having an overhang of 1-4 nucleotides at the 3′ terminus of the antisense strand.

[0669] In some embodiments, a KHK-targeting dsRNAi oligonucleotide for reducing KHK expression comprises (i) an antisense strand of 19-30 nucleotides in length, wherein the antisense strand comprises a nucleotide sequence comprising a region of complementarity to a KHK mRNA target sequence, wherein the region of complementarity is set forth in SEQ ID NO: 951; and (ii) a sense strand of 19-50 nucleotides in length comprising a region of complementarity to the antisense strand, wherein the antisense and sense strands are separate strands which form an asymmetric duplex region having an overhang of 1-4 nucleotides at the 3′ terminus of the antisense strand.

[0670] In some embodiments, a KHK-targeting dsRNAi oligonucleotide for reducing KHK expression comprises (i) an antisense strand of 19-30 nucleotides in length, wherein the antisense strand comprises a nucleotide sequence comprising a region of complementarity to a KHK mRNA target sequence, wherein the region of complementarity is set forth in SEQ ID NO: 952; and (ii) a sense strand of 19-50 nucleotides in length comprising a region of complementarity to the antisense strand, wherein the antisense and sense strands are separate strands which form an asymmetric duplex region having an overhang of 1-4 nucleotides at the 3′ terminus of the antisense strand.

[0671] In some embodiments, a KHK-targeting dsRNAi oligonucleotide for reducing KHK expression comprises (i) an antisense strand of 19-30 nucleotides in length, wherein the antisense strand comprises a nucleotide sequence comprising a region of complementarity to a KHK mRNA target sequence, wherein the region of complementarity is set forth in SEQ ID NO: 953; and (ii) a sense strand of 19-50 nucleotides in length comprising a region of complementarity to the antisense strand, wherein the antisense and sense strands are separate strands which form an asymmetric duplex region having an overhang of 1-4 nucleotides at the 3′ terminus of the antisense strand.

[0672] In some embodiments, a KHK-targeting dsRNAi oligonucleotide for reducing KHK expression comprises (i) an antisense strand of 19-30 nucleotides in length, wherein the antisense strand comprises a nucleotide sequence comprising a region of complementarity to a KHK mRNA target sequence, wherein the region of complementarity is set forth in SEQ ID NO: 948; and (ii) a sense strand of 19-50 nucleotides in length comprising a region of complementarity to the antisense strand and a stem-loop at the 3′terminus, wherein the stem-loop is set forth as S1-L-S2, wherein S1 is complementary to S2 and wherein L forms a loop between S1 and S2 of 3 to 5 nucleotides in length, wherein the antisense and sense strands are separate strands which form an asymmetric duplex region having an overhang of 1-4 nucleotides at the 3′ terminus of the antisense strand.

[0673] In some embodiments, a KHK-targeting dsRNAi oligonucleotide for reducing KHK expression comprises (i) an antisense strand of 19-30 nucleotides in length, wherein the antisense strand comprises a nucleotide sequence comprising a region of complementarity to a KHK mRNA target sequence, wherein the region of complementarity is set forth in SEQ ID NO: 949; and (ii) a sense strand of 19-50 nucleotides in length comprising a region of complementarity to the antisense strand and a stem-loop at the 3′terminus, wherein the stem-loop is set forth as S1-L-S2, wherein S1 is complementary to S2 and wherein L forms a loop between S1 and S2 of 3 to 5 nucleotides in length, wherein the antisense and sense strands are separate strands which form an asymmetric duplex region having an overhang of 1-4 nucleotides at the 3′ terminus of the antisense strand.

[0674] In some embodiments, a KHK-targeting dsRNAi oligonucleotide for reducing KHK expression comprises (i) an antisense strand of 19-30 nucleotides in length, wherein the antisense strand comprises a nucleotide sequence comprising a region of complementarity to a KHK mRNA target sequence, wherein the region of complementarity is set forth in SEQ ID NO: 950; and (ii) a sense strand of 19-50 nucleotides in length comprising a region of complementarity to the antisense strand and a stem-loop at the 3′terminus, wherein the stem-loop is set forth as S1-L-S2, wherein S1 is complementary to S2 and wherein L forms a loop between S1 and S2 of 3 to 5 nucleotides in length, wherein the antisense and sense strands are separate strands which form an asymmetric duplex region having an overhang of 1-4 nucleotides at the 3′ terminus of the antisense strand.

[0675] In some embodiments, a KHK-targeting dsRNAi oligonucleotide for reducing KHK expression comprises (i) an antisense strand of 19-30 nucleotides in length, wherein the antisense strand comprises a nucleotide sequence comprising a region of complementarity to a KHK mRNA target sequence, wherein the region of complementarity is set forth in SEQ ID NO: 951; and (ii) a sense strand of 19-50 nucleotides in length comprising a region of complementarity to the antisense strand and a stem-loop at the 3′terminus, wherein the stem-loop is set forth as S1-L-S2, wherein S1 is complementary to S2 and wherein L forms a loop between S1 and S2 of 3 to 5 nucleotides in length, wherein the antisense and sense strands are separate strands which form an asymmetric duplex region having an overhang of 1-4 nucleotides at the 3′ terminus of the antisense strand.

[0676] In some embodiments, a KHK-targeting dsRNAi oligonucleotide for reducing KHK expression comprises (i) an antisense strand of 19-30 nucleotides in length, wherein the antisense strand comprises a nucleotide sequence comprising a region of complementarity to a KHK mRNA target sequence, wherein the region of complementarity is set forth in SEQ ID NO: 952; and (ii) a sense strand of 19-50 nucleotides in length comprising a region of complementarity to the antisense strand and a stem-loop at the 3′terminus, wherein the stem-loop is set forth as S1-L-S2, wherein S1 is complementary to S2 and wherein L forms a loop between S1 and S2 of 3 to 5 nucleotides in length, wherein the antisense and sense strands are separate strands which form an asymmetric duplex region having an overhang of 1-4 nucleotides at the 3′ terminus of the antisense strand.

[0677] In some embodiments, a KHK-targeting dsRNAi oligonucleotide for reducing KHK expression comprises (i) an antisense strand of 19-30 nucleotides in length, wherein the antisense strand comprises a nucleotide sequence comprising a region of complementarity to a KHK mRNA target sequence, wherein the region of complementarity is set forth in SEQ ID NO: 953; and (ii) a sense strand of 19-50 nucleotides in length comprising a region of complementarity to the antisense strand and a stem-loop at the 3′terminus, wherein the stem-loop is set forth as S1-L-S2, wherein S1 is complementary to S2 and wherein L forms a loop between S1 and S2 of 3 to 5 nucleotides in length, wherein the antisense and sense strands are separate strands which form an asymmetric duplex region having an overhang of 1-4 nucleotides at the 3′ terminus of the antisense strand.

[0678] In some embodiments, a KHK-targeting dsRNAi oligonucleotide for reducing KHK expression comprises (i) an antisense strand of 19-30 nucleotides in length, wherein the antisense strand comprises a nucleotide sequence comprising a region of complementarity to a KHK mRNA target sequence, wherein the region of complementarity is set forth in SEQ ID NO: 948; and (ii) a sense strand of 19-50 nucleotides in length comprising a region of complementarity to the antisense strand, wherein the region of complementarity to the antisense strand is set forth in SEQ ID NO: 942, wherein the antisense and sense strands are separate strands which form an asymmetric duplex region having an overhang of 1-4 nucleotides at the 3′ terminus of the antisense strand.

[0679] In some embodiments, a KHK-targeting dsRNAi oligonucleotide for reducing KHK expression comprises (i) an antisense strand of 19-30 nucleotides in length, wherein the antisense strand comprises a nucleotide sequence comprising a region of complementarity to a KHK mRNA target sequence, wherein the region of complementarity is set forth in SEQ ID NO: 949; and (ii) a sense strand of 19-50 nucleotides in length comprising a region of complementarity to the antisense strand, wherein the region of complementarity to the antisense strand is set forth in SEQ ID NO: 943, wherein the antisense and sense strands are separate strands which form an asymmetric duplex region having an overhang of 1-4 nucleotides at the 3′ terminus of the antisense strand.

[0680] In some embodiments, a KHK-targeting dsRNAi oligonucleotide for reducing KHK expression comprises (i) an antisense strand of 19-30 nucleotides in length, wherein the antisense strand comprises a nucleotide sequence comprising a region of complementarity to a KHK mRNA target sequence, wherein the region of complementarity is set forth in SEQ ID NO: 950; and (ii) a sense strand of 19-50 nucleotides in length comprising a region of complementarity to the antisense strand, wherein the region of complementarity to the antisense strand is set forth in SEQ ID NO: 944, wherein the antisense and sense strands are separate strands which form an asymmetric duplex region having an overhang of 1-4 nucleotides at the 3′ terminus of the antisense strand.

[0681] In some embodiments, a KHK-targeting dsRNAi oligonucleotide for reducing KHK expression comprises (i) an antisense strand of 19-30 nucleotides in length, wherein the antisense strand comprises a nucleotide sequence comprising a region of complementarity to a KHK mRNA target sequence, wherein the region of complementarity is set forth in SEQ ID NO: 951; and (ii) a sense strand of 19-50 nucleotides in length comprising a region of complementarity to the antisense strand, wherein the region of complementarity to the antisense strand is set forth in SEQ ID NO: 945, wherein the antisense and sense strands are separate strands which form an asymmetric duplex region having an overhang of 1-4 nucleotides at the 3′ terminus of the antisense strand.

[0682] In some embodiments, a KHK-targeting dsRNAi oligonucleotide for reducing KHK expression comprises (i) an antisense strand of 19-30 nucleotides in length, wherein the antisense strand comprises a nucleotide sequence comprising a region of complementarity to a KHK mRNA target sequence, wherein the region of complementarity is set forth in SEQ ID NO: 952; and (ii) a sense strand of 19-50 nucleotides in length comprising a region of complementarity to the antisense strand, wherein the region of complementarity to the antisense strand is set forth in SEQ ID NO: 946, wherein the antisense and sense strands are separate strands which form an asymmetric duplex region having an overhang of 1-4 nucleotides at the 3′ terminus of the antisense strand.

[0683] In some embodiments, a KHK-targeting dsRNAi oligonucleotide for reducing KHK expression comprises (i) an antisense strand of 19-30 nucleotides in length, wherein the antisense strand comprises a nucleotide sequence comprising a region of complementarity to a KHK mRNA target sequence, wherein the region of complementarity is set forth in SEQ ID NO: 953; and (ii) a sense strand of 19-50 nucleotides in length comprising a region of complementarity to the antisense strand, wherein the region of complementarity to the antisense strand is set forth in SEQ ID NO: 947, wherein the antisense and sense strands are separate strands which form an asymmetric duplex region having an overhang of 1-4 nucleotides at the 3′ terminus of the antisense strand.

[0684] In some embodiments, a KHK-targeting dsRNAi oligonucleotide for reducing KHK expression comprises (i) an antisense strand of 19-30 nucleotides in length, wherein the antisense strand comprises a nucleotide sequence comprising a region of complementarity to a KHK mRNA target sequence, wherein the region of complementarity is set forth in SEQ ID NO: 948; and (ii) a sense strand of 19-50 nucleotides in length comprising a region of complementarity to the antisense strand and a stem-loop at the 3′terminus, wherein the region of complementarity to the antisense strand is set forth in SEQ ID NO: 942, wherein the stem-loop is set forth as S1-L-S2, wherein S1 is complementary to S2 and wherein L forms a loop between S1 and S2 of 3 to 5 nucleotides in length, wherein the antisense and sense strands are separate strands which form an asymmetric duplex region having an overhang of 1-4 nucleotides at the 3′ terminus of the antisense strand.

[0685] In some embodiments, a KHK-targeting dsRNAi oligonucleotide for reducing KHK expression comprises (i) an antisense strand of 19-30 nucleotides in length, wherein the antisense strand comprises a nucleotide sequence comprising a region of complementarity to a KHK mRNA target sequence, wherein the region of complementarity is set forth in SEQ ID NO: 949; and (ii) a sense strand of 19-50 nucleotides in length comprising a region of complementarity to the antisense strand and a stem-loop at the 3′terminus, wherein the region of complementarity to the antisense strand is set forth in SEQ ID NO: 943, wherein the stem-loop is set forth as S1-L-S2, wherein S1 is complementary to S2 and wherein L forms a loop between S1 and S2 of 3 to 5 nucleotides in length, wherein the antisense and sense strands are separate strands which form an asymmetric duplex region having an overhang of 1-4 nucleotides at the 3′ terminus of the antisense strand.

[0686] In some embodiments, a KHK-targeting dsRNAi oligonucleotide for reducing KHK expression comprises (i) an antisense strand of 19-30 nucleotides in length, wherein the antisense strand comprises a nucleotide sequence comprising a region of complementarity to a KHK mRNA target sequence, wherein the region of complementarity is set forth in SEQ ID NO: 950; and (ii) a sense strand of 19-50 nucleotides in length comprising a region of complementarity to the antisense strand and a stem-loop at the 3′terminus, wherein the region of complementarity to the antisense strand is set forth in SEQ ID NO: 944, wherein the stem-loop is set forth as S1-L-S2, wherein S1 is complementary to S2 and wherein L forms a loop between S1 and S2 of 3 to 5 nucleotides in length, wherein the antisense and sense strands are separate strands which form an asymmetric duplex region having an overhang of 1-4 nucleotides at the 3′ terminus of the antisense strand.

[0687] In some embodiments, a KHK-targeting dsRNAi oligonucleotide for reducing KHK expression comprises (i) an antisense strand of 19-30 nucleotides in length, wherein the antisense strand comprises a nucleotide sequence comprising a region of complementarity to a KHK mRNA target sequence, wherein the region of complementarity is set forth in SEQ ID NO: 951; and (ii) a sense strand of 19-50 nucleotides in length comprising a region of complementarity to the antisense strand and a stem-loop at the 3′terminus, wherein the region of complementarity to the antisense strand is set forth in SEQ ID NO: 945, wherein the stem-loop is set forth as S1-L-S2, wherein S1 is complementary to S2 and wherein L forms a loop between S1 and S2 of 3 to 5 nucleotides in length, wherein the antisense and sense strands are separate strands which form an asymmetric duplex region having an overhang of 1-4 nucleotides at the 3′ terminus of the antisense strand.

[0688] In some embodiments, a KHK-targeting dsRNAi oligonucleotide for reducing KHK expression comprises (i) an antisense strand of 19-30 nucleotides in length, wherein the antisense strand comprises a nucleotide sequence comprising a region of complementarity to a KHK mRNA target sequence, wherein the region of complementarity is set forth in SEQ ID NO: 952; and (ii) a sense strand of 19-50 nucleotides in length comprising a region of complementarity to the antisense strand and a stem-loop at the 3′terminus, wherein the region of complementarity to the antisense strand is set forth in SEQ ID NO: 946, wherein the stem-loop is set forth as S1-L-S2, wherein S1 is complementary to S2 and wherein L forms a loop between S1 and S2 of 3 to 5 nucleotides in length, wherein the antisense and sense strands are separate strands which form an asymmetric duplex region having an overhang of 1-4 nucleotides at the 3′ terminus of the antisense strand.

[0689] In some embodiments, a KHK-targeting dsRNAi oligonucleotide for reducing KHK expression comprises (i) an antisense strand of 19-30 nucleotides in length, wherein the antisense strand comprises a nucleotide sequence comprising a region of complementarity to a KHK mRNA target sequence, wherein the region of complementarity is set forth in SEQ ID NO: 953; and (ii) a sense strand of 19-50 nucleotides in length comprising a region of complementarity to the antisense strand and a stem-loop at the 3′terminus, wherein the region of complementarity to the antisense strand is set forth in SEQ ID NO: 947, wherein the stem-loop is set forth as S1-L-S2, wherein S1 is complementary to S2 and wherein L forms a loop between S1 and S2 of 3 to 5 nucleotides in length, wherein the antisense and sense strands are separate strands which form an asymmetric duplex region having an overhang of 1-4 nucleotides at the 3′ terminus of the antisense strand.

[0690] In some embodiments, a KHK-targeting dsRNAi oligonucleotide for reducing KHK expression comprises the modification pattern of:

Sense Strand:
5′-mX-S-mX-mX-mX-mX-mX-mX-fX-fX-fX-fX-mX-mX-mX-
mX-mX-mX-mX-mX-mX-mX-mX-mX-mX-mX-mX-mX-[ademA-
GalNAc]-[ademA-GalNAc]-[ademA-GalNAc]-mX-mX-mX-
mX-mX-mX-3′.
Hybridized to:
Antisense Strand:
5′-[MePhosphonate-4O-mX]-S-fX-S-fX-S-fX-fX-mX-
fX-mX-mX-fX-mX-mX-mX-fX-mX-mX-mX-mX-mX-mX-S-mX-
S-mX-3′;

[0691] wherein mX=2′-O-methyl modified nucleotide, fX=2′-fluoro modified nucleotide, —S—=phosphorothioate linkage, =phosphodiester linkage, [MePhosphonate-4O-mX]=5′-methoxyphosphonate-4-oxy modified nucleotide, and ademA-GalNAc=GalNAc attached to an adenine nucleotide

[0692] In some embodiments, a KHK-targeting dsRNAi oligonucleotide for reducing KHK expression comprises the modification pattern of

Sense Strand:
5′-mX-S-mX-fX-mX-mX-mX-mX-fX-fX-fX-mX-fX-fX-mX-
mX-mX-fX-mX-mX-mX-mX-mX-mX-mX-mX-mX-mX-[ademA-
GalNAc]-[ademA-GalNAc]-[ademA-GalNAc]-mX-mX-mX-
mX-mX-mX-3′.
Hybridized to:
Antisense Strand:
5′-[MePhosphonate-40-mX]-S-fX-S-fX-S-fX-fX-mX-
fX-fX-mX-fX-mX-mX-mX-fX-mX-fX-mX-mX-fX-mX-S-mX-
S-mX-3′;

[0693] wherein mX=2′-O-methyl modified nucleotide, fX=2′-fluoro modified nucleotide,-S-=phosphorothioate linkage,-=phosphodiester linkage, [MePhosphonate-40-mX]=5′-methoxyphosphonate-4-oxy modified nucleotide, and ademA-GalNAc=GalNAc attached to an adenine nucleotide

[0694] In some embodiments, a KHK-targeting dsRNAi oligonucleotide for reducing KHK expression provided by the disclosure comprising a sense strand selected from SEQ ID NOs: 774-804 and antisense strand selected from SEQ ID NOs: 819-849. In some embodiments, a KHK-targeting dsRNAi oligonucleotide for reducing KHK expression provided by the disclosure comprises a sense strand comprising the nucleotide sequence as set forth in SEQ ID NO: 775 and an antisense strand comprising the nucleotide sequence as set forth in SEQ ID NO: 820. In some embodiments, a KHK-targeting dsRNAi oligonucleotide for reducing KHK expression provided by the disclosure comprises a sense strand comprising the nucleotide sequence as set forth in SEQ ID NO: 779 and an antisense strand comprising the nucleotide sequence as set forth in SEQ ID NO: 824. In some embodiments, a KHK-targeting dsRNAi oligonucleotide for reducing KHK expression provided by the disclosure comprises a sense strand comprising the nucleotide sequence as set forth in SEQ ID NO: 780 and an antisense strand comprising the nucleotide sequence as set forth in SEQ ID NO: 825. In some embodiments, a KHK-targeting dsRNAi oligonucleotide for reducing KHK expression provided by the disclosure comprises a sense strand comprising the nucleotide sequence as set forth in SEQ ID NO: 782 and an antisense strand comprising the nucleotide sequence as set forth in SEQ ID NO: 827. In some embodiments, a KHK-targeting dsRNAi oligonucleotide for reducing KHK expression provided by the disclosure comprises a sense strand comprising the nucleotide sequence as set forth in SEQ ID NO: 785 and an antisense strand comprising the nucleotide sequence as set forth in SEQ ID NO: 830. In some embodiments, a KHK-targeting dsRNAi oligonucleotide for reducing KHK expression provided by the disclosure comprises a sense strand comprising the nucleotide sequence as set forth in SEQ ID NO: 804 and an antisense strand comprising the nucleotide sequence as set forth in SEQ ID NO: 849.

[0695] In some embodiments, the KHK-targeting dsRNAi oligonucleotides sense and antisense strands comprise nucleotide sequences selected from the group consisting of:
[0696] (a) SEQ ID NOs: 774 and 819, respectively;
[0697] (b) SEQ ID NOs: 775 and 820, respectively;
[0698] (c) SEQ ID NOs: 776 and 821, respectively;
[0699] (d) SEQ ID NOs: 777 and 822, respectively;
[0700] (e) SEQ ID NOs: 778 and 823, respectively;
[0701] (f) SEQ ID NOs: 779 and 824, respectively;
[0702] (g) SEQ ID NOs: 780 and 825, respectively;
[0703] (h) SEQ ID NOs: 781 and 826, respectively;
[0704] (i) SEQ ID NOs: 782 and 827, respectively;
[0705] (j) SEQ ID NOs: 783 and 828, respectively;
[0706] (k) SEQ ID NOs: 784 and 829, respectively;
[0707] (l) SEQ ID NOs: 785 and 830, respectively;
[0708] (m) SEQ ID NOs: 786 and 831, respectively;
[0709] (n) SEQ ID NOs: 787 and 832, respectively;
[0710] (0) SEQ ID NOs: 788 and 833, respectively;
[0711] (p) SEQ ID NOs: 789 and 834, respectively;
[0712] (q) SEQ ID NOs: 790 and 835, respectively;
[0713] (r) SEQ ID NOs: 791 and 836, respectively;
[0714] (s) SEQ ID NOs: 792 and 837, respectively;
[0715] (t) SEQ ID NOs: 793 and 838, respectively;
[0716] (u) SEQ ID NOs: 794 and 839, respectively;
[0717] (v) SEQ ID NOs: 795 and 840, respectively;
[0718] (w) SEQ ID NOs: 796 and 841, respectively;
[0719] (x) SEQ ID NOs: 797 and 842, respectively;
[0720] (y) SEQ ID NOs: 798 and 843, respectively;
[0721] (z) SEQ ID NOs: 799 and 844, respectively;
[0722] (aa) SEQ ID NOs: 800 and 845, respectively;
[0723] (bb) SEQ ID NOs: 801 and 846, respectively;
[0724] (cc) SEQ ID NOs: 802 and 847, respectively;
[0725] (dd) SEQ ID NOs: 803 and 848, respectively; and
[0726] (ee) SEQ ID NOs: 804 and 849, respectively.

[0727] In some embodiments, a KHK-targeting dsRNAi oligonucleotide for reducing KHK expression provided by the disclosure comprising a sense strand selected from SEQ ID NOs: 805-818 and an antisense strand selected from SEQ ID NOs: 850-863.

[0728] In some embodiments, the KHK-targeting dsRNAi oligonucleotides sense and antisense strands comprise nucleotide sequences selected from the group consisting of:
[0729] (a) SEQ ID NOs: 805 and 850, respectively;
[0730] (b) SEQ ID NOs: 806 and 851, respectively;
[0731] (c) SEQ ID NOs: 807 and 852, respectively;
[0732] (d) SEQ ID NOs: 808 and 853, respectively;
[0733] (e) SEQ ID NOs: 809 and 854, respectively;
[0734] (f) SEQ ID NOs: 810 and 855, respectively;
[0735] (g) SEQ ID NOs: 811 and 856, respectively;
[0736] (h) SEQ ID NOs: 812 and 857, respectively;
[0737] (i) SEQ ID NOs: 813 and 858, respectively;
[0738] (j) SEQ ID NOs: 814 and 859, respectively;
[0739] (k) SEQ ID NOs: 815 and 860, respectively;
[0740] (l) SEQ ID NOs: 816 and 861, respectively;
[0741] (m) SEQ ID NOs: 817 and 862, respectively and;
[0742] (n) SEQ ID NOs: 818 and 863, respectively.

[0743] In some embodiments, the KHK-targeting dsRNAi oligonucleotides comprise a sense strand comprising SEQ ID NO: 775 and an antisense strand comprising SEQ ID NO: 820, wherein said dsRNA is in the form of a conjugate having the structure as shown in FIG. 10A continuing to FIG. 10B, or pharmaceutically acceptable salts thereof.

[0744] In some embodiments, the KHK-targeting dsRNAi oligonucleotides comprise a sense strand comprising SEQ ID NO: 779 and an antisense strand comprising SEQ ID NO: 824, wherein said dsRNA is in the form of a conjugate having as shown in FIG. 11A continuing to FIG. 11B, or pharmaceutically acceptable salts thereof.

[0745] In some embodiments, the KHK-targeting dsRNAi oligonucleotides comprise a sense strand comprising SEQ ID NO: 780 and an antisense strand comprising SEQ ID NO: 825, wherein said dsRNA is in the form of a conjugate as depicted in FIG. 12A continuing to FIG. 12B, or pharmaceutically acceptable salts thereof.

[0746] In some embodiments, the KHK-targeting dsRNAi oligonucleotides comprise a sense strand comprising SEQ ID NO: 782 and an antisense strand comprising SEQ ID NO: 827, wherein said dsRNA is in the form of a conjugate having the structures depicted in FIG. 13A continuing to FIG. 13B, or pharmaceutically acceptable salts thereof.

[0747] In some embodiments, the KHK-targeting dsRNAi oligonucleotides comprise a sense strand comprising SEQ ID NO: 785 and an antisense strand comprising SEQ ID NO: 830, wherein said dsRNA is in the form of a conjugate having the structures depicted in FIG. 14A continuing to FIG. 14B, or pharmaceutically acceptable salts thereof.

[0748] In some embodiments, the KHK-targeting dsRNAi oligonucleotides comprise a sense strand comprising SEQ ID NO: 804 and an antisense strand comprising SEQ ID NO: 849, wherein said dsRNA is in the form of a conjugate having the structures depicted in FIG. 15A continuing to FIG. 15B, or pharmaceutically acceptable salts thereof.

### Formulations

[0749] Various formulations have been developed to facilitate oligonucleotide use. For example, oligonucleotides (e.g., dsRNAi oligonucleotides) can be delivered to a subject or a cellular environment using a formulation that minimizes degradation, facilitates delivery and/or uptake, or provides another beneficial property to the oligonucleotides in the formulation. In some embodiments, provided herein are compositions comprising oligonucleotides (e.g., dsRNAi oligonucleotides) reduce the expression of KHK. Such compositions can be suitably formulated such that when administered to a subject, either into the immediate environment of a target cell or systemically, a sufficient portion of the oligonucleotides enter the cell to reduce KHK expression. Any variety of suitable oligonucleotide formulations can be used to deliver oligonucleotides for the reduction of KHK as disclosed herein. In some embodiments, an oligonucleotide is formulated in buffer solutions such as phosphate buffered saline solutions, liposomes, micellar structures, and capsids. Any of the oligonucleotides described herein may be provided not only as nucleic acids, but also in the form of a pharmaceutically acceptable salt.

[0750] Formulations of oligonucleotides with cationic lipids can be used to facilitate transfection of the oligonucleotides into cells. For example, cationic lipids, such as lipofectin, cationic glycerol derivatives, and polycationic molecules (e.g., polylysine), can be used. Suitable lipids include Oligofectamine, Lipofectamine (Life Technologies), NC388 (Ribozyme Pharmaceuticals, Inc., Boulder, Colo.), or FuGene 6 (Roche) all of which can be used according to the manufacturer's instructions.

[0751] Accordingly, in some embodiments, a formulation comprises a lipid nanoparticle. In some embodiments, an excipient comprises a liposome, a lipid, a lipid complex, a microsphere, a microparticle, a nanosphere or a nanoparticle, or may be otherwise formulated for administration to the cells, tissues, organs, or body of a subject in need thereof (see, e.g., Remington: THE SCIENCE AND PRACTICE OF PHARMACY, 22nd edition, Pharmaceutical Press, 2013).

[0752] In some embodiments, the formulations herein comprise an excipient. In some embodiments, an excipient confers to a composition improved stability, improved absorption, improved solubility and/or therapeutic enhancement of the active ingredient. In some embodiments, an excipient is a buffering agent (e.g., sodium citrate, sodium phosphate, a tris base, or sodium hydroxide) or a vehicle (e.g., a buffered solution, petrolatum, dimethyl sulfoxide, or mineral oil). In some embodiments, an oligonucleotide is lyophilized for extending its shelf-life and then made into a solution before use (e.g., administration to a subject). Accordingly, an excipient in a composition comprising any one of the oligonucleotides described herein may be a lyoprotectant (e.g., mannitol, lactose, polyethylene glycol or polyvinylpyrrolidone) or a collapse temperature modifier (e.g., dextran, Ficoll™ or gelatin).

[0753] In some embodiments, a pharmaceutical composition is formulated to be compatible with its intended route of administration. Examples of routes of administration include parenteral (e.g., intravenous, intramuscular, intraperitoneal, intradermal, subcutaneous), oral (e.g., inhalation), transdermal (e.g., topical), transmucosal and rectal administration.

[0754] Pharmaceutical compositions suitable for injectable use include sterile aqueous solutions (where water soluble) or dispersions and sterile powders for the extemporaneous preparation of sterile injectable solutions or dispersions. For intravenous administration, suitable carriers include physiological saline, bacteriostatic water, Cremophor EL™ (BASF, Parsippany, N.J.) or phosphate buffered saline (PBS). The carrier can be a solvent or dispersion medium containing, for example, water, ethanol, polyol (e.g., glycerol, propylene glycol, and liquid polyethylene glycol, and the like), and suitable mixtures thereof. In many cases, it will be preferable to include isotonic agents, for example, sugars, polyalcohols such as mannitol, sorbitol, sodium chloride in the composition. Sterile injectable solutions can be prepared by incorporating the oligonucleotides in a required amount in a selected solvent with one or a combination of ingredients enumerated above, as required, followed by filtered sterilization.

[0755] In some embodiments, a composition may contain at least about 0.1% of the therapeutic agent (e.g., a dsRNAi oligonucleotide for reducing KHK expression) or more, although the percentage of the active ingredient(s) may be between about 1% to about 80% or more of the weight or volume of the total composition. Factors such as solubility, bioavailability, biological half-life, route of administration, product shelf life, as well as other pharmacological considerations will be contemplated by one skilled in the art of preparing such pharmaceutical formulations, and as such, a variety of dosages and treatment regimens may be desirable.

### Methods of Use

### Reducing KHK Expression

[0756] In some embodiments, the disclosure provides methods for contacting or delivering to a cell or population of cells an effective amount of oligonucleotides (e.g., dsRNAi oligonucleotides) herein to reduce KHK expression. In some embodiments, a reduction of KHK expression is determined by measuring a reduction in the amount or level of KHK mRNA, KHK protein, or KHK activity in a cell. The methods include those described herein and known to one of ordinary skill in the art.

[0757] Methods provided herein are useful in any appropriate cell type. In some embodiments, a cell is any cell that expresses KHK mRNA (e.g., hepatocytes). In some embodiments, the cell is a primary cell obtained from a subject. In some embodiments, the primary cell has undergone a limited number of passages such that the cell substantially maintains its natural phenotypic properties. In some embodiments, a cell to which the oligonucleotide is delivered is ex vivo or in vitro (i.e., can be delivered to a cell in culture or to an organism in which the cell resides).

[0758] In some embodiments, the oligonucleotides herein are delivered to a cell or population of cells using a nucleic acid delivery method known in the art including, but not limited to, injection of a solution containing the oligonucleotides, bombardment by particles covered by the oligonucleotides, exposing the cell or population of cells to a solution containing the oligonucleotides, or electroporation of cell membranes in the presence of the oligonucleotides. Other methods known in the art for delivering oligonucleotides to cells may be used, such as lipid-mediated carrier transport, chemical-mediated transport, and cationic liposome transfection such as calcium phosphate, and others.

[0759] In some embodiments, reduction of KHK expression is determined by an assay or technique that evaluates one or more molecules, properties, or characteristics of a cell or population of cells associated with KHK expression, or by an assay or technique that evaluates molecules that are directly indicative of KHK expression in a cell or population of cells (e.g., KHK mRNA or KHK protein). In some embodiments, the extent to which an oligonucleotide provided herein reduces KHK expression is evaluated by comparing KHK expression in a cell or population of cells contacted with the oligonucleotide to an appropriate control (e.g., an appropriate cell or population of cells not contacted with the oligonucleotide or contacted with a control oligonucleotide). In some embodiments, a control amount or level of KHK expression in a control cell or population of cells is predetermined, such that the control amount or level need not be measured in every instance the assay or technique is performed. The predetermined level or value can take a variety of forms. In some embodiments, a predetermined level or value can be single cut-off value, such as a median or mean.

[0760] In some embodiments, contacting or delivering an oligonucleotide (e.g., dsRNAi oligonucleotides) described herein to a cell or a population of cells results in a reduction in KHK expression in a cell or population of cells not contacted with the oligonucleotide or contacted with a control oligonucleotide. In some embodiments, the reduction in KHK expression is about 1% or lower, about 5% or lower, about 10% or lower, about 15% or lower, about 20% or lower, about 25% or lower, about 30% or lower, about 35% or lower, about 40% or lower, about 45% or lower, about 50% or lower, about 55% or lower, about 60% or lower, about 70% or lower, about 80% or lower, or about 90% or lower relative to a control amount or level of KHK expression. In some embodiments, the control amount or level of KHK expression is an amount or level of KHK mRNA and/or KHK protein in a cell or population of cells that has not been contacted with an oligonucleotide herein. In some embodiments, the effect of delivery of an oligonucleotide to a cell or population of cells according to a method herein is assessed after any finite period or amount of time (e.g., minutes, hours, days, weeks, months). For example, in some embodiments, KHK expression is determined in a cell or population of cells at least about 4 hours, about 8 hours, about 12 hours, about 18 hours, about 24 hours; or at least about 1 day, about 2 days, about 3 days, about 4 days, about 5 days, about 6 days, about 7 days, about 8 days, about 9 days, about 10 days, about 11 days, about 12 days, about 13 days, about 14 days, about 21 days, about 28 days, about 35 days, about 42 days, about 49 days, about 56 days, about 63 days, about 70 days, about 77 days, or about 84 days or more after contacting or delivering the oligonucleotide to the cell or population of cells. In some embodiments, KHK expression is determined in a cell or population of cells at least about 1 month, about 2 months, about 3 months, about 4 months, about 5 months, or about 6 months or more after contacting or delivering the oligonucleotide to the cell or population of cells.

[0761] In some embodiments, an oligonucleotide is delivered in the form of a transgene that is engineered to express in a cell the oligonucleotide or strands comprising the oligonucleotide (e.g., its sense and antisense strands). In some embodiments, an oligonucleotide is delivered using a transgene engineered to express any oligonucleotide disclosed herein. Transgenes may be delivered using viral vectors (e.g., adenovirus, retrovirus, vaccinia virus, poxvirus, adeno-associated virus, or herpes simplex virus) or non-viral vectors (e.g., plasmids or synthetic mRNAs). In some embodiments, transgenes can be injected directly to a subject.

### Treatment Methods

[0762] The disclosure provides oligonucleotides for use as a medicament, in particular for use in a method for the treatment of diseases, disorders, and conditions associated with expression of KHK. The disclosure also provides oligonucleotides for use, or adaptable for use, to treat a subject (e.g., a human having a disease, disorder or condition associated with KHK expression) that would benefit from reducing KHK expression. In some respects, the disclosure provides oligonucleotides for use, or adapted for use, to treat a subject having a disease, disorder or condition associated with expression of KHK. The disclosure also provides oligonucleotides for use, or adaptable for use, in the manufacture of a medicament or pharmaceutical composition for treating a disease, disorder or condition associated with KHK expression. In some embodiments, the oligonucleotides for use, or adaptable for use, target KHK mRNA and reduce KHK expression (e.g., via the RNAi pathway). In some embodiments, the oligonucleotides for use, or adaptable for use, target KHK mRNA and reduce the amount or level of KHK mRNA, KHK protein and/or KHK activity.

[0763] In addition, in some embodiments of the methods herein, a subject having a disease, disorder, or condition associated with KHK expression or is predisposed to the same is selected for treatment with an oligonucleotide (e.g., a double-stranded oligonucleotide) herein. In some embodiments, the method comprises selecting an individual having a marker (e.g., a biomarker) for a disease, disorder, or condition associated with KHK expression or predisposed to the same, such as, but not limited to, KHK mRNA, KHK protein, or a combination thereof. Likewise, and as detailed below, some embodiments of the methods provided by the disclosure include steps such as measuring or obtaining a baseline value for a marker of KHK expression (e.g., KHK), and then comparing such obtained value to one or more other baseline values or values obtained after the subject is administered the oligonucleotide to assess the effectiveness of treatment.

[0764] The disclosure also provides methods of treating a subject having, suspected of having, or at risk of developing a disease, disorder or condition associated with a KHK expression with an oligonucleotide provided herein. In some aspects, the disclosure provides methods of treating or attenuating the onset or progression of a disease, disorder or condition associated with KHK expression using the oligonucleotides herein. In other aspects, the disclosure provides methods to achieve one or more therapeutic benefits in a subject having a disease, disorder, or condition associated with KHK expression using the oligonucleotides provided herein. In some embodiments of the methods herein, the subject is treated by administering a therapeutically effective amount of any one or more of the oligonucleotides provided herein. In some embodiments, treatment comprises reducing KHK expression. In some embodiments, the subject is treated therapeutically. In some embodiments, the subject is treated prophylactically.

[0765] In some embodiments of the methods herein, one or more oligonucleotides (e.g., dsRNAi oligonucleotides) herein, or a pharmaceutical composition comprising one or more oligonucleotides, is administered to a subject having a disease, disorder or condition associated with KHK expression such that KHK expression is reduced in the subject, thereby treating the subject. In some embodiments, an amount or level of KHK mRNA is reduced in the subject. In some embodiments, an amount or level of KHK protein is reduced in the subject. In some embodiments, an amount or level of KHK activity is reduced in the subject. In some embodiments, an amount or level of triglyceride (TG) (e.g., one or more TG(s) or total TGs) is reduced in the subject. In some embodiments, an amount or level of plasma glucose is reduced in the subject. In some embodiments, an amount or level of blood pressure (e.g., systolic pressure, diastolic pressure, or both) is reduced in the subject. In some embodiments, an amount or level of abdominal fat is reduced in the subject. In some embodiments, an amount or level of cholesterol (e.g., total cholesterol, LDL cholesterol, and/or HDL cholesterol) is reduced in the subject. In some embodiments, an amount or level of liver steatosis is reduced in the subject. In some embodiments, an amount or level of liver fibrosis is reduced in the subject. In some embodiments, the ratio of total cholesterol to HDL cholesterol is altered in the subject. In some embodiments, any combination of the following is reduced or altered in the subject: KHK expression, an amount or level of KHK mRNA, an amount or level of KHK protein, an amount or level of KHK activity, an amount or level of blood glucose, an amount or level of abdominal fat, an amount or level of blood pressure, an amount or level of TG, an amount or level of cholesterol and/or the ratio of total cholesterol to HDL cholesterol, an amount or level of liver steatosis, and amount or level of liver fibrosis.

[0766] In some embodiments of the methods herein, an oligonucleotide (e.g., dsRNAi oligonucleotides) herein, or a pharmaceutical composition comprising the oligonucleotide, is administered to a subject having a disease, disorder or condition associated with KHK such that KHK expression is reduced in the subject by at least about 30%, about 35%, about 40%, about 45%, about 50%, about 55%, about 60%, about 65%, about 70%, about 75%, about 80%, about 85%, about 90%, about 95%, about 99% or greater than 99% when compared to KHK expression prior to administration of one or more oligonucleotides or pharmaceutical composition. In some embodiments, KHK expression is reduced in the subject by at least about 30%, about 35%, about 40%, about 45%, about 50%, about 55%, about 60%, about 65%, about 70%, about 75%, about 80%, about 85%, about 90%, about 95%, about 99% or greater than 99% when compared to KHK expression in a subject (e.g., a reference or control subject) not receiving the oligonucleotide or oligonucleotides or pharmaceutical composition or receiving a control oligonucleotide or oligonucleotides, pharmaceutical composition or treatment.

[0767] In some embodiments of the methods herein, an oligonucleotide or oligonucleotides herein, or a pharmaceutical composition comprising the oligonucleotide or oligonucleotides, is administered to a subject having a disease, disorder or condition associated with KHK expression such that an amount or level of KHK mRNA is reduced in the subject by at least about 30%, about 35%, about 40%, about 45%, about 50%, about 55%, about 60%, about 65%, about 70%, about 75%, about 80%, about 85%, about 90%, about 95%, about 99% or greater than 99% when compared to the amount or level of KHK mRNA prior to administration of the oligonucleotide or pharmaceutical composition. In some embodiments, an amount or level of KHK mRNA is reduced in the subject by at least about 30%, about 35%, about 40%, about 45%, about 50%, about 55%, about 60%, about 65%, about 70%, about 75%, about 80%, about 85%, about 90%, about 95%, about 99% or greater than 99% when compared to an amount or level of KHK mRNA in a subject (e.g., a reference or control subject) not receiving the oligonucleotide or oligonucleotides or pharmaceutical composition or receiving a control oligonucleotide or oligonucleotides, pharmaceutical composition or treatment.

[0768] In some embodiments of the methods herein, an oligonucleotide or oligonucleotides herein, or a pharmaceutical composition comprising the oligonucleotide or oligonucleotides, is administered to a subject having a disease, disorder or condition associated with KHK expression such that an amount or level of KHK protein is reduced in the subject by at least about 30%, about 35%, about 40%, about 45%, about 50%, about 55%, about 60%, about 65%, about 70%, about 75%, about 80%, about 85%, about 90%, about 95%, about 99% or greater than 99% when compared to the amount or level of KHK protein prior to administration of the oligonucleotide or pharmaceutical composition. In some embodiments, an amount or level of KHK protein is reduced in the subject by at least about 30%, about 35%, about 40%, about 45%, about 50%, about 55%, about 60%, about 65%, about 70%, about 75%, about 80%, about 85%, about 90%, about 95%, about 99% or greater than 99% when compared to an amount or level of KHK protein in a subject (e.g., a reference or control subject) not receiving the oligonucleotide or oligonucleotides or pharmaceutical composition or receiving a control oligonucleotide, oligonucleotides or pharmaceutical composition or treatment.

[0769] In some embodiments of the methods herein, an oligonucleotide or oligonucleotides (e.g., dsRNAi oligonucleotides) herein, or a pharmaceutical composition comprising the oligonucleotide or oligonucleotides, is administered to a subject having a disease, disorder or condition associated with KHK such that an amount or level of KHK activity/expression is reduced in the subject by at least about 30%, about 35%, about 40%, about 45%, about 50%, about 55%, about 60%, about 65%, about 70%, about 75%, about 80%, about 85%, about 90%, about 95%, about 99% or greater than 99% when compared to the amount or level of KHK activity prior to administration of the oligonucleotide or pharmaceutical composition. In some embodiments, an amount or level of KHK activity is reduced in the subject by at least about 30%, about 35%, about 40%, about 45%, about 50%, about 55%, about 60%, about 65%, about 70%, about 75%, about 80%, about 85%, about 90%, about 95%, about 99% or greater than 99% when compared to an amount or level of KHK activity in a subject (e.g., a reference or control subject) not receiving the oligonucleotide or pharmaceutical composition or receiving a control oligonucleotide, pharmaceutical composition or treatment.

[0770] In some embodiments of the methods herein, an oligonucleotide herein, or a pharmaceutical composition comprising the oligonucleotide, is administered to a subject having a disease, disorder or condition associated with KHK expression such that an amount or level of TG (e.g., one or more TGs or total TGs) is reduced in the subject by at least about 30%, about 35%, about 40%, about 45%, about 50%, about 55%, about 60%, about 65%, about 70%, about 75%, about 80%, about 85%, about 90%, about 95%, about 99% or greater than 99% when compared to the amount or level of TG prior to administration of the oligonucleotide or pharmaceutical composition. In some embodiments, an amount or level of TG is reduced in the subject by at least about 30%, about 35%, about 40%, about 45%, about 50%, about 55%, about 60%, about 65%, about 70%, about 75%, about 80%, about 85%, about 90%, about 95%, about 99% or greater than 99% when compared to an amount or level of TG in a subject (e.g., a reference or control subject) not receiving the oligonucleotide or pharmaceutical composition or receiving a control oligonucleotide, pharmaceutical composition or treatment.

[0771] Generally, a normal or desirable TG range for a human patient is <150 mg/dL of blood, with <100 being considered ideal. In some embodiments, the patient selected for treatment or treated is identified or determined to have an amount or level of TG of ≥150 mg/dl. In some embodiments, the patient selected for treatment or treated is identified or determined to have an amount or level of TG in the range of 150 to 199 mg/dL, which is considered borderline high TG levels. In some embodiments, the patient selected for treatment or treated is identified or determined to have an amount or level of TG in the range of 200 to 499 mg/dL, which is considered high TG levels. In some embodiments, the patient selected for treatment or treated is identified or determined to have an amount or level of TG in the range of 500 mg/dL or higher (i.e., ≥500 mg/dL), which is considered very high TG levels. In some embodiments, the patient selected for treatment or treated is identified or determined to have an amount or level of TG which is ≥150 mg/dl, ≥200 mg/dl or >500 mg/dl. In some embodiments, the patient selected for treatment or treated is identified or determined to have an amount of level of TG of 200 to 499 mg/dL, or 500 mg/dL or higher. In some embodiments, the patient selected for treatment or treated is identified or determined to have an amount or level of TG which is ≥200 mg/dL. In some embodiments of the methods herein, an oligonucleotide (e.g., dsRNAi oligonucleotide) herein, or a pharmaceutical composition comprising the oligonucleotide, is administered to a subject having a disease, disorder or condition associated with KHK expression such that an amount or level of cholesterol (e.g., total cholesterol, LDL cholesterol, and/or HDL cholesterol) is reduced in the subject by at least about 30%, about 35%, about 40%, about 45%, about 50%, about 55%, about 60%, about 65%, about 70%, about 75%, about 80%, about 85%, about 90%, about 95%, about 99% or greater than 99% when compared to the amount or level of cholesterol prior to administration of the oligonucleotide or pharmaceutical composition. In some embodiments, an amount or level of cholesterol is reduced in the subject by at least about 30%, about 35%, about 40%, about 45%, about 50%, about 55%, about 60%, about 65%, about 70%, about 75%, about 80%, about 85%, about 90%, about 95%, about 99% or greater than 99% when compared to an amount or level of cholesterol in a subject (e.g., a reference or control subject) not receiving the oligonucleotide or pharmaceutical composition or receiving a control oligonucleotide, pharmaceutical composition or treatment.

[0772] Generally, a normal or desirable cholesterol range (total cholesterol) for an adult human patient is <200 mg/dl of blood. In some embodiments, the patient selected for treatment or treated is identified or determined to have an amount or level of cholesterol of ≥200 mg/dL. In some embodiments, the patient selected for treatment or treated is identified or determined to have an amount or level of cholesterol in the range of 200 to 239 mg/dl, which is considered borderline high cholesterol levels. In some embodiments, the patient selected for treatment or treated is identified or determined to have an amount or level of cholesterol in the range of 240 mg/dl and higher (i.e., ≥240 mg/dL), which is considered high cholesterol levels. In some embodiments, the patient selected from treatment or treated is identified or determined to have an amount or level of cholesterol of 200 to 239 mg/dl, or 240 mg/dL or higher. In some embodiments, the patient selected for treatment or treated is identified or determined to have an amount or level of cholesterol which is ≥200 mg/dl or ≥240 mg/dL or higher.

[0773] In some embodiments of the methods herein, an oligonucleotide herein, or a pharmaceutical composition comprising the oligonucleotide, is administered to a subject having a disease, disorder, or condition associated with KHK expression such that an amount or level of liver fibrosis is reduced in the subject by at least about 30%, about 35%, about 40%, about 45%, about 50%, about 55%, about 60%, about 65%, about 70%, about 75%, about 80%, about 85%, about 90%, about 95%, about 99% or greater than 99% when compared to the amount or level of liver fibrosis prior to administration of the oligonucleotide or pharmaceutical composition. In some embodiments, an amount or level of liver fibrosis is reduced in the subject by at least about 30%, about 35%, about 40%, about 45%, about 50%, about 55%, about 60%, about 65%, about 70%, about 75%, about 80%, about 85%, about 90%, about 95%, about 99% or greater than 99% when compared to an amount or level of liver fibrosis in a subject (e.g., a reference or control subject) not receiving the oligonucleotide or pharmaceutical composition or receiving a control oligonucleotide, pharmaceutical composition or treatment.

[0774] In some embodiments of the methods herein, an oligonucleotide herein, or a pharmaceutical composition comprising the oligonucleotide, is administered to a subject having a disease, disorder or condition associated with KHK expression such that an amount or level of liver steatosis is reduced in the subject by at least about 30%, about 35%, about 40%, about 45%, about 50%, about 55%, about 60%, about 65%, about 70%, about 75%, about 80%, about 85%, about 90%, about 95%, about 99% or greater than 99% when compared to the amount or level of liver steatosis prior to administration of the oligonucleotide or pharmaceutical composition. In some embodiments, an amount or level of liver steatosis is reduced in the subject by at least about 30%, about 35%, about 40%, about 45%, about 50%, about 55%, about 60%, about 65%, about 70%, about 75%, about 80%, about 85%, about 90%, about 95%, about 99% or greater than 99% when compared to an amount or level of liver steatosis in a subject (e.g., a reference or control subject) not receiving the oligonucleotide or pharmaceutical composition or receiving a control oligonucleotide, pharmaceutical composition or treatment.

[0775] Suitable methods for determining KHK expression, the amount or level of KHK mRNA, KHK protein, KHK activity, TG, plasma glucose or cholesterol amount or activity in the subject, or in a sample from the subject, are known in the art. Further, the Examples set forth herein illustrate methods for determining KHK expression.

[0776] In some embodiments, KHK expression, the amount or level of KHK mRNA, KHK protein, KHK activity, TG, plasma glucose, or cholesterol, is reduced in a cell (e.g., a hepatocyte), a population or a group of cells (e.g., an organoid), an organ (e.g., liver), blood or a fraction thereof (e.g., plasma), a tissue (e.g., liver tissue), a sample (e.g., a liver biopsy sample), or any other appropriate biological material obtained or isolated from the subject. In some embodiments, KHK expression, the amount or level of KHK mRNA, KHK protein, KHK activity, TG, plasma glucose or cholesterol or any combination thereof, is reduced in more than one type of cell (e.g., a hepatocyte and one or more other type(s) of cell), more than one groups of cells, more than one organ (e.g., liver and one or more other organ(s)), more than one fraction of blood (e.g., plasma and one or more other blood fraction(s)), more than one type of tissue (e.g., liver tissue and one or more other type(s) of tissue), or more than one type of sample (e.g., a liver biopsy sample and one or more other type(s) of biopsy sample).

[0777] Generally, a normal or desirable blood sugar level for a human patient is <140 mg/dL. Blood sugar levels between 140 and 199 mg/dL two hours after eating indicates pre-diabetes, and >200 mg/dL indicates diabetes. In some embodiments, the patient selected for treatment or treated is identified or determined to have a level of blood sugar between about 140 mg/dl and about 199 mg/dL, which is considered pre-diabetes. In some embodiments, the patient selected for treatment or treated is identified or determined to have a level of blood sugar ≥200 mg/dL, which is considered diabetes. In some embodiments of the methods herein, an oligonucleotide (e.g., dsRNAi oligonucleotide) herein, or a pharmaceutical composition comprising the oligonucleotide, is administered to a subject having a disease, disorder or condition associated with KHK expression such that an amount or level of blood sugar is reduced to a normal or pre-diabetes range.

[0778] Examples of a disease, disorder or condition associated with KHK expression include, but are not limited to, glucose intolerance, pre-diabetes, type-1 diabetes, type-2 diabetes, metabolic liver diseases, non-alcoholic fatty liver disease (NAFLD), non-alcoholic steatohepatitis (NASH), drug-induced liver diseases, alcohol-induced liver diseases, infectious agent induced liver diseases, inflammatory liver diseases, immune system dysfunction-mediated liver diseases, dyslipidemia, cardiovascular diseases, restenosis, syndrome X, metabolic syndrome, diabetes, obesity, hypertension, chronic cholangiopathies such as Primary Sclerosing Cholangitis (PSC), Primary Biliary Cholangitis (PBC), biliary atresia, progressive familial intrahepatic cholestasis type 3 (PFIC3), inflammatory bowel diseases, Crohn's disease, ulcerative colitis, liver cancer, hepatocellular carcinoma, gastrointestinal cancer, gastric cancer, colorectal cancer, metabolic disease-induced liver fibrosis or cirrhosis, NAFLD induced fibrosis or cirrhosis, NASH-induced fibrosis or cirrhosis, alcohol-induced liver fibrosis or cirrhosis, drug-induced liver fibrosis or cirrhosis, radiation- or chemotherapy-induced fibrosis or cirrhosis, biliary tract fibrosis, liver fibrosis or cirrhosis due to any chronic cholestatic disease, gut fibrosis of any etiology, Crohn's disease induced fibrosis, ulcerative colitis-induced fibrosis, intestine (e.g. small intestine) fibrosis, colon fibrosis, stomach fibrosis, disease of elevated uric acid (e.g. hyperuricemia, gout), sugar craving, alcohol craving, aldolase B deficiency, hereditary fructose intolerance, chronic kidney disease, diabetic nephropathy, kidney fibrosis, liver failure, liver function loss, coagulopathy, steatohepatitis, disorders of glycemic control, and other KHK-associated metabolic-related disorders and diseases. Of particular interest herein are metabolic syndrome, hypertriglyceridemia, NAFLD, NASH, obesity, or a combination thereof.

[0779] Because of their high specificity, the oligonucleotides herein (e.g., dsRNAi oligonucleotides) specifically target mRNAs of target genes of cells and tissue(s), or organs(s) (e.g., liver). In preventing disease, the target gene may be one which is required for initiation or maintenance of the disease or which has been identified as being associated with a higher risk of contracting the disease. In treating disease, the oligonucleotide can be brought into contact with the cells, tissue(s), or organ(s) (e.g., liver) exhibiting or responsible for mediating the disease. For example, an oligonucleotide substantially identical to all or part of a wild-type (i.e., native) or mutated gene associated with a disorder or condition associated with KHK expression may be brought into contact with or introduced into a cell or tissue type of interest such as a hepatocyte or other liver cell.

[0780] In some embodiments, the target gene may be a target gene from any mammal, such as a human target. Any gene may be silenced according to the method described herein.

[0781] Methods described herein typically involve administering to a subject an effective amount of an oligonucleotide herein (e.g., a dsRNAi oligonucleotide), that is, an amount capable of producing a desirable therapeutic result. A therapeutically acceptable amount may be an amount that can therapeutically treat a disease or disorder. The appropriate dosage for any one subject will depend on certain factors, including the subject's size, body surface area, age, the particular composition to be administered, the active ingredient(s) in the composition, time and route of administration, general health, and other drugs being administered concurrently.

[0782] In some embodiments, a subject is administered any one of the compositions herein either enterally (e.g., orally, by gastric feeding tube, by duodenal feeding tube, via gastrostomy or rectally), parenterally (e.g., subcutaneous injection, intravenous injection or infusion, intra-arterial injection or infusion, intraosseous infusion, intramuscular injection, intracerebral injection, intracerebroventricular injection, intrathecal), topically (e.g., epicutaneous, inhalational, via eye drops, or through a mucous membrane), or by direct injection into a target organ (e.g., the liver of a subject). Typically, oligonucleotides herein are administered intravenously or subcutaneously.

[0783] As a non-limiting set of examples, the oligonucleotides herein (e.g., dsRNAi oligonucleotides) would typically be administered quarterly (once every three months), bi-monthly (once every two months), monthly or weekly. For example, the oligonucleotides may be administered every week or at intervals of two, or three weeks. Alternatively, the oligonucleotides may be administered daily. In some embodiments, a subject is administered one or more loading doses of the oligonucleotide followed by one or more maintenance doses of the oligonucleotide.

[0784] In some embodiments the oligonucleotides herein are administered alone or in combination. In some embodiments the oligonucleotides herein are administered in combination concurrently, sequentially (in any order), or intermittently. For example, two oligonucleotides may be co-administered concurrently. Alternatively, one oligonucleotide may be administered and followed any amount of time later (e.g., one hour, one day, one week or one month) by the administration of a second oligonucleotide.

[0785] In some embodiments, the subject to be treated is a human or non-human primate or other mammalian subject. Other exemplary subjects include domesticated animals such as dogs and cats; livestock such as horses, cattle, pigs, sheep, goats, and chickens; and animals such as mice, rats, guinea pigs, and hamsters.

[0786] In some embodiments, a single dose of one or more oligonucleotides (e.g., dsRNAi oligonucleotides) herein, or a pharmaceutical composition comprising the oligonucleotide(s), is administered to a subject having a disease, disorder, or condition associated with KHK expression such that an amount or level of KHK mRNA and/or KHK protein, preferably of KHK protein, is reduced in the subject. Said reduction of an amount or level of KHK mRNA and/or KHK protein may be determined by comparison with the amount or level of KHK mRNA and/or KHK protein in a subject (e.g., a reference or control subject) not receiving the oligonucleotide(s) or pharmaceutical composition or receiving one or more control oligonucleotides or pharmaceutical compositions or treatments, or—preferably—by comparison with the amount or level of KHK mRNA and/or KHK protein prior to administration of the oligonucleotide(s) or pharmaceutical composition. Said amount or level of KHK mRNA and/or KHK protein may be determined from liver biopsy samples from the subject. Said single dose may be administered subcutaneously. Said dose of the oligonucleotide(s) may be below 10 mg/kg bodyweight of the subject, e.g. 6 mg/kg or below, in particular from 0.01 mg/kg to 5 mg/kg. Said reduction of an amount or level of KHK mRNA and/or KHK protein may be detectable more than 10 days after the single dose administration of the oligonucleotide(s), e.g. it may remain detectable at day 28, 56, and/or 84 after administration. Said reduction of an amount or level of KHK mRNA and/or KHK protein may be, e.g., at least about 30%, about 35%, about 40%, about 45%, about 50%, about 55%, about 60%, about 65%, about 70%, about 75%, about 80%, about 85%, about 90%, about 95%, about 99% or greater than 99%. In a preferred embodiment, the reduction of an amount or level of KHK mRNA and/or KHK protein remains detectable at day 28, optionally at day 56 and/or 84, after subcutaneous administration of a single dose of one or more oligonucleotides (e.g., dsRNAi oligonucleotides) herein, or a pharmaceutical composition comprising the oligonucleotide(s).

### Kits

[0787] In some embodiments, the disclosure provides a kit comprising an oligonucleotide herein, and instructions for use. In some embodiments, the kit comprises an oligonucleotide herein, and a package insert containing instructions for use of the kit and/or any component thereof. In some embodiments, the kit comprises, in a suitable container, an oligonucleotide herein, one or more controls, and various buffers, reagents, enzymes and other standard ingredients well known in the art. In some embodiments, the container comprises at least one vial, well, test tube, flask, bottle, syringe, or other container means, into which the oligonucleotide is placed, and in some instances, suitably aliquoted. In some embodiments where an additional component is provided, the kit contains additional containers into which this component is placed. The kits can also include a means for containing the oligonucleotide and any other reagent in close confinement for commercial sale. Such containers may include injection or blow-molded plastic containers into which the desired vials are retained. Containers and/or kits can include labeling with instructions for use and/or warnings.

[0788] In some embodiments, a kit comprises an oligonucleotide herein, and a pharmaceutically acceptable carrier, or a pharmaceutical composition comprising the oligonucleotide and instructions for treating or delaying progression of a disease, disorder or condition associated with KHK expression in a subject in need thereof.

### Definitions

[0789] As used herein, the term “antisense oligonucleotide” encompasses a nucleic acid-based molecule which has a sequence complementary to all or part of the target mRNA, in particular seed sequence thereby capable of forming a duplex with a mRNA. Thus, the term “antisense oligonucleotide”, as used herein, may be referred to as “complementary nucleic acid-based inhibitor”.

[0790] As used herein, “approximately” or “about”, as applied to one or more values of interest, refers to a value that is similar to a stated reference value. In certain embodiments, “about” refers to a range of values that fall within 25%, 20%, 19%, 18%, 17%, 16%, 15%, 14%, 13%, 12%, 11%, 10%, 9%, 8%, 7%, 6%, 5%, 4%, 3%, 2%, 1% or less in either direction (greater than or less than) of the stated reference value unless otherwise stated or otherwise evident from the context (except where such number would exceed 100% of a possible value).

[0791] As used herein, “administer”, “administering”, “administration” and the like refers to providing a substance (e.g., an oligonucleotide) to a subject in a manner that is pharmacologically useful (e.g., to treat a condition in the subject).

[0792] As used herein, “attenuate”, “attenuating”, “attenuation” and the like refers to reducing or effectively halting. As a non-limiting example, one or more of the treatments herein may reduce or effectively halt the onset or progression of dyslipidemia/hypertriglyceridemia/hyperlipidemia, NAFLD, NASH, or glucose intolerance in a subject. This attenuation may be exemplified by, for example, a decrease in one or more aspects (e.g., symptoms, tissue characteristics, and cellular, inflammatory or immunological activity, etc.) of dyslipidemia/hypertriglyceridemia/hyperlipidemia, NAFLD, NASH, or glucose intolerance, no detectable progression (worsening) of one or more aspects of dyslipidemia/hypertriglyceridemia/hyperlipidemia, NAFLD, NASH, or glucose intolerance, or no detectable aspects of dyslipidemia/hypertriglyceridemia/hyperlipidemia, NAFLD, NASH, or glucose intolerance in a subject when they might otherwise be expected.

[0793] As used herein, “complementary” refers to a structural relationship between two nucleotides (e.g., on two opposing nucleic acids or on opposing regions of a single nucleic acid strand) that permits the two nucleotides to form base pairs with one another. For example, a purine nucleotide of one nucleic acid that is complementary to a pyrimidine nucleotide of an opposing nucleic acid may base pair together by forming hydrogen bonds with one another. In some embodiments, complementary nucleotides can base pair in the Watson-Crick manner or in any other manner that allows for the formation of stable duplexes. In some embodiments, two nucleic acids may have regions of multiple nucleotides that are complementary with each other to form regions of complementarity, as described herein.

[0794] As used herein, “deoxyribonucleotide” refers to a nucleotide having a hydrogen in place of a hydroxyl at the 2′ position of its pentose sugar when compared with a ribonucleotide. A modified deoxyribonucleotide is a deoxyribonucleotide having one or more modifications or substitutions of atoms other than at the 2′ position, including modifications or substitutions in or of the sugar, phosphate group or base.

[0795] As used herein, “double-stranded oligonucleotide” or “ds oligonucleotide” refers to an oligonucleotide that is substantially in a duplex form. In some embodiments, the complementary base-pairing of duplex region(s) of a double-stranded oligonucleotide is formed between antiparallel sequences of nucleotides of covalently separate nucleic acid strands. In some embodiments, complementary base-pairing of duplex region(s) of a double-stranded oligonucleotide is formed between antiparallel sequences of nucleotides of nucleic acid strands that are covalently linked. In some embodiments, complementary base-pairing of duplex region(s) of a double-stranded oligonucleotide is formed from single nucleic acid strand that is folded (e.g., via a hairpin) to provide complementary antiparallel sequences of nucleotides that base pair together. In some embodiments, a double-stranded oligonucleotide comprises two covalently separate nucleic acid strands that are fully duplexed with one another. However, in some embodiments, a double-stranded oligonucleotide comprises two covalently separate nucleic acid strands that are partially duplexed (e.g., having overhangs at one or both ends). In some embodiments, a double-stranded oligonucleotide comprises antiparallel sequence of nucleotides that are partially complementary, and thus, may have one or more mismatches, which may include internal mismatches or end mismatches.

[0796] As used herein, “duplex,” in reference to nucleic acids (e.g., oligonucleotides), refers to a structure formed through complementary base pairing of two antiparallel sequences of nucleotides.

[0797] As used herein, “excipient” refers to a non-therapeutic agent that may be included in a composition, for example, to provide or contribute to a desired consistency or stabilizing effect.

[0798] As used herein, the phrase “glucose intolerance” refers to a metabolic condition resulting in higher-than-normal levels of blood glucose. Glucose intolerance can include type 1, type 1.5, and type 2 diabetes.

[0799] As used herein, “hepatocyte” or “hepatocytes” refers to cells of the parenchymal tissues of the liver. These cells make up about 70%-85% of the liver's mass and manufacture serum albumin, FBN and the prothrombin group of clotting factors (except for Factors 3 and 4). Markers for hepatocyte lineage cells include, but are not limited to, transthyretin (Ttr), glutamine synthetase (Glul), hepatocyte nuclear factor 1a (Hnf1a) and hepatocyte nuclear factor 4a (Hnf4a). Markers for mature hepatocytes may include, but are not limited to, cytochrome P450 (Cyp3a11), fumarylacetoacetate hydrolase (Fah), glucose 6-phosphate (G6p), albumin (Alb) and OC2-2F8. See, e.g., Huch et al. (2013) Nature 494:247-50.

[0800] As used herein, a “hepatotoxic agent” refers to a chemical compound, virus or other substance that is itself toxic to the liver or can be processed to form a metabolite that is toxic to the liver. Hepatotoxic agents may include, but are not limited to, carbon tetrachloride (CCI4), acetaminophen (paracetamol), vinyl chloride, arsenic, chloroform, nonsteroidal anti-inflammatory drugs (such as aspirin and phenylbutazone).

[0801] As used herein, the term “ketohexokinase” or “KHK” refers to an enzyme, specifically a hepatic fructokinase, that catalyzes the phosphorylation of fructose. The KHK gene encodes two protein isoforms (KHK-A and KHK-C). The two products are generated from the same primary transcript by alternative splicing. The term “KHK” is intended to refer to both isoforms unless stated otherwise. ‘KHK’ may also refer to the gene which encodes the protein.

[0802] As used herein, “labile linker” refers to a linker that can be cleaved (e.g., by acidic pH). A “fairly stable linker” refers to a linker that cannot be cleaved.

[0803] As used herein, “liver inflammation” or “hepatitis” refers to a physical condition in which the liver becomes swollen, dysfunctional and/or painful, especially as a result of injury or infection, as may be caused by exposure to a hepatotoxic agent. Symptoms may include jaundice (yellowing of the skin or eyes), fatigue, weakness, nausea, vomiting, appetite reduction and weight loss. Liver inflammation, if left untreated, may progress to fibrosis, cirrhosis, liver failure or liver cancer.

[0804] As used herein, “liver fibrosis”, “Liver Fibrosis” or “fibrosis of the liver” refers to an excessive accumulation in the liver of extracellular matrix proteins, which could include collagens (I, III, and IV), FBN, undulin, elastin, laminin, hyaluronan and proteoglycans resulting from inflammation and liver cell death. Liver fibrosis, if left untreated, may progress to cirrhosis, liver failure or liver cancer.

[0805] As used herein, “loop” refers to an unpaired region of a nucleic acid (e.g., oligonucleotide) that is flanked by two antiparallel regions of the nucleic acid that are sufficiently complementary to one another, such that under appropriate hybridization conditions (e.g., in a phosphate buffer, in a cell), the two antiparallel regions, which flank the unpaired region, hybridize to form a duplex (referred to as a “stem”).

[0806] As used herein, “Metabolic syndrome′ or “metabolic liver disease” refers to a disorder characterized by a cluster of associated medical conditions and associated pathologies including, but not limited to the following medical conditions: abdominal obesity, elevated blood pressure, elevated fasting plasma glucose, high serum triglycerides, liver fibrosis, and low levels of high-density lipoprotein (HDL) levels. As used herein, the term metabolic syndrome or metabolic liver disease may encompass a wide array of direct and indirect manifestations, diseases and pathologies associated with metabolic syndrome and metabolic liver disease, with an expanded list of conditions used throughout the document.

[0807] As used herein, “modified internucleotide linkage” refers to an internucleotide linkage having one or more chemical modifications when compared with a reference internucleotide linkage comprising a phosphodiester bond. In some embodiments, a modified nucleotide is a non-naturally occurring linkage. Typically, a modified internucleotide linkage confers one or more desirable properties to a nucleic acid in which the modified internucleotide linkage is present. For example, a modified internucleotide linkage may improve thermal stability, resistance to degradation, nuclease resistance, solubility, bioavailability, bioactivity, reduced immunogenicity, etc.

[0808] As used herein, “modified nucleotide” refers to a nucleotide having one or more chemical modifications when compared with a corresponding reference nucleotide selected from: adenine ribonucleotide, guanine ribonucleotide, cytosine ribonucleotide, uracil ribonucleotide, adenine deoxyribonucleotide, guanine deoxyribonucleotide, cytosine deoxyribonucleotide and thymidine deoxyribonucleotide. In some embodiments, a modified nucleotide is a non-naturally occurring nucleotide. In some embodiments, a modified nucleotide has one or more chemical modification in its sugar, nucleobase and/or phosphate group. In some embodiments, a modified nucleotide has one or more chemical moieties conjugated to a corresponding reference nucleotide. Typically, a modified nucleotide confers one or more desirable properties to a nucleic acid in which the modified nucleotide is present. For example, a modified nucleotide may improve thermal stability, resistance to degradation, nuclease resistance, solubility, bioavailability, bioactivity, reduced immunogenicity, etc.

[0809] As used herein, “nicked tetraloop structure” refers to a structure of a RNAi oligonucleotide that is characterized by separate sense (passenger) and antisense (guide) strands, in which the sense strand has a region of complementarity with the antisense strand, and in which at least one of the strands, generally the sense strand, has a tetraloop configured to stabilize an adjacent stem region formed within the at least one strand.

[0810] As used herein, “oligonucleotide” refers to a short nucleic acid (e.g., less than about 100 nucleotides in length). An oligonucleotide may be single-stranded (ss) or ds. An oligonucleotide may or may not have duplex regions. As a set of non-limiting examples, an oligonucleotide may be, but is not limited to, a small interfering RNA (siRNA), microRNA (miRNA), short hairpin RNA (shRNA), dicer substrate interfering RNA (DsiRNA), antisense oligonucleotide, short siRNA or ss siRNA. In some embodiments, a double-stranded (dsRNA) is an RNAi oligonucleotide.

[0811] As used herein, “overhang” (or “overhang sequence”) refers to terminal non-base pairing nucleotide(s) resulting from one strand or region extending beyond the terminus of a complementary strand with which the one strand or region forms a duplex. In some embodiments, an overhang comprises one or more unpaired nucleotides extending from a duplex region at the 5′ terminus or 3′ terminus of a dsRNA. In certain embodiments, the overhang is a 3′ or 5′ overhang on the antisense strand or sense strand of a dsRNA.

[0812] As used herein, “phosphate analog” refers to a chemical moiety that mimics the electrostatic and/or steric properties of a phosphate group. In some embodiments, a phosphate analog is positioned at the 5′ terminal nucleotide of an oligonucleotide in place of a 5′-phosphate, which is often susceptible to enzymatic removal. In some embodiments, a 5′ phosphate analog contains a phosphatase-resistant linkage. Examples of phosphate analogs include, but are not limited to, 5′ phosphonates, such as 5′ methylene phosphonate (5′-MP) and 5′-(E)-vinylphosphonate (5′-VP). In some embodiments, an oligonucleotide has a phosphate analog at a 4′-carbon position of the sugar (referred to as a “4′-phosphate analog”) at a 5′-terminal nucleotide. An example of a 4′-phosphate analog is oxymethylphosphonate, in which the oxygen atom of the oxymethyl group is bound to the sugar moiety (e.g., at its 4′-carbon) or analog thereof. See, e.g., US Patent Publication No. 2019-0177729. Other modifications have been developed for the 5′ end of oligonucleotides (see, e.g., Intl. Patent Application No. WO 2011/133871; U.S. Pat. No. 8,927,513; and Prakash et al. (2015) NUCLEIC ACIDS RES. 43:2993-3011).

[0813] As used herein, “reduced expression” of a gene (e.g., KHK) refers to a decrease in the amount or level of RNA transcript (e.g., KHK mRNA) or protein encoded by the gene and/or a decrease in the amount or level of activity of the gene in a cell, a population of cells, a sample, or a subject, when compared to an appropriate reference (e.g., a reference cell, population of cells, sample or subject). For example, the act of contacting a cell with an oligonucleotide herein (e.g., an oligonucleotide comprising an antisense strand having a nucleotide sequence that is complementary to a nucleotide sequence comprising KHK mRNA) may result in a decrease in the amount or level of KHK mRNA, protein and/or activity (e.g., via degradation of KHK mRNA by the RNAi pathway) when compared to a cell that is not treated with the dsRNA.

[0814] Similarly, and as used herein, “reducing expression” refers to an act that results in reduced expression of a gene (e.g., KHK).

[0815] As used herein, “reduction of KHK expression” refers to a decrease in the amount or level of KHK mRNA, KHK protein and/or KHK activity in a cell, a population of cells, a sample or a subject when compared to an appropriate reference (e.g., a reference cell, population of cells, sample, or subject).

[0816] As used herein, “region of complementarity” refers to a sequence of nucleotides of a nucleic acid (e.g., a dsRNA) that is sufficiently complementary to an antiparallel sequence of nucleotides to permit hybridization between the two sequences of nucleotides under appropriate hybridization conditions (e.g., in a phosphate buffer, in a cell, etc.). In some embodiments, an oligonucleotide herein comprises a targeting sequence having a region of complementarity to a mRNA target sequence. In some embodiments, the region of complementarity is full complementary. In some embodiments, the region of complementarity is partially complementary (e.g., up to 3 nucleotide mismatches).

[0817] As used herein, “ribonucleotide” refers to a nucleotide having a ribose as its pentose sugar, which contains a hydroxyl group at its 2′ position. A modified ribonucleotide is a ribonucleotide having one or more modifications or substitutions of atoms other than at the 2′ position, including modifications or substitutions in or of the ribose, phosphate group or base.

[0818] As used herein, “RNAi oligonucleotide” refers to either (a) a double-stranded oligonucleotide having a sense strand (passenger) and antisense strand (guide), in which the antisense strand or part of the antisense strand is used by the Argonaute 2 (Ago2) endonuclease in the cleavage of a target mRNA (e.g., KHK mRNA) or (b) a single-stranded oligonucleotide having a single antisense strand, where that antisense strand (or part of that antisense strand) is used by the Ago2 endonuclease in the cleavage of a target mRNA (e.g., KHK mRNA).

[0819] As used herein, “strand” refers to a single, contiguous sequence of nucleotides linked together through internucleotide linkages (e.g., phosphodiester linkages or phosphorothioate linkages). In some embodiments, a strand has two free ends (e.g., a 5′ end and a 3′ end).

[0820] As used herein, “subject” means any mammal, including mice, rabbits, and humans. In one embodiment, the subject is a human or NHP. Moreover, “individual” or “patient” may be used interchangeably with “subject.”

[0821] As used herein, “synthetic” refers to a nucleic acid or other molecule that is artificially synthesized (e.g., using a machine (e.g., a solid-state nucleic acid synthesizer)) or that is otherwise not derived from a natural source (e.g., a cell or organism) that normally produces the molecule.

[0822] As used herein, “targeting ligand” refers to a molecule (e.g., a carbohydrate, amino sugar, cholesterol, polypeptide, or lipid) that selectively binds to a cognate molecule (e.g., a receptor) of a tissue or cell of interest and that is conjugatable to another substance for purposes of targeting the other substance to the tissue or cell of interest. For example, in some embodiments, a targeting ligand may be conjugated to an oligonucleotide for purposes of targeting the oligonucleotide to a specific tissue or cell of interest. In some embodiments, a targeting ligand selectively binds to a cell surface receptor. Accordingly, in some embodiments, a targeting ligand when conjugated to an oligonucleotide facilitates delivery of the oligonucleotide into a particular cell through selective binding to a receptor expressed on the surface of the cell and endosomal internalization by the cell of the complex comprising the oligonucleotide, targeting ligand and receptor. In some embodiments, a targeting ligand is conjugated to an oligonucleotide via a linker that is cleaved following or during cellular internalization such that the oligonucleotide is released from the targeting ligand in the cell.

[0823] As used herein, “tetraloop” refers to a loop that increases stability of an adjacent duplex formed by hybridization of flanking sequences of nucleotides. The increase in stability is detectable as an increase in melting temperature (Tₘ) of an adjacent stem duplex that is higher than the Tₘ of the adjacent stem duplex expected, on average, from a set of loops of comparable length consisting of randomly selected sequences of nucleotides. For example, a tetraloop can confer a Tₘ of at least about 50° C., at least about 55° C., at least about 56° C., at least about 58° C., at least about 60° C., at least about 65° C. or at least about 75° C. in 10 mM Na₂HPO₄ to a hairpin comprising a duplex of at least 2 base pairs (bp) in length. In some embodiments, a tetraloop can confer a Tm of at least about 50° C., at least about 55° C., at least about 56° C., at least about 58° C., at least about 60° C., at least about 65° C. or at least about 75° C. in 10 mM NaH₂PO₄ to a hairpin comprising a duplex of at least 2 base pairs (bp) in length. In some embodiments, a tetraloop may stabilize a bp in an adjacent stem duplex by stacking interactions. In addition, interactions among the nucleotides in a tetraloop include, but are not limited to, non-Watson-Crick base pairing, stacking interactions, hydrogen bonding and contact interactions (Cheong et al. (1990) NATURE 346:680-82; Heus & Pardi (1991) SCIENCE 253:191-94). In some embodiments, a tetraloop comprises or consists of 3 to 6 nucleotides and is typically 4 to 5 nucleotides. In certain embodiments, a tetraloop comprises or consists of 3, 4, 5 or 6 nucleotides, which may or may not be modified (e.g., which may or may not be conjugated to a targeting moiety). In one embodiment, a tetraloop consists of 4 nucleotides. Any nucleotide may be used in the tetraloop and standard IUPAC-IUB symbols for such nucleotides may be used as described in Cornish-Bowden (1985) Nucleic Acids Res. 13:3021-3030. For example, the letter “N” may be used to mean that any base may be in that position, the letter “R” may be used to show that A (adenine) or G (guanine) may be in that position, and “B” may be used to show that C (cytosine), G (guanine), or T (thymine) may be in that position. Examples of tetraloops include the UNCG family of tetraloops (e.g., UUCG), the GNRA family of tetraloops (e.g., GAAA), and the CUUG tetraloop (Woese et al. (1990) PROC. NATL. ACAD. SCI. USA 87:8467-8471; Antao et al. (1991) NUCLEIC ACIDS RES. 19:5901-5905). Examples of DNA tetraloops include the d (GNNA) family of tetraloops (e.g., d (GTTA), the d (GNRA)) family of tetraloops, the d (GNAB) family of tetraloops, the d (CNNG) family of tetraloops, and the d (TNCG) family of tetraloops (e.g., d (TTCG)). See, e.g., Nakano et al. (2002) BIOCHEM. 41:14281-92; Okabe et al. (2000) NIPPON KAGAKKAI KOEN YOKOSHU 78:731. In some embodiments, the tetraloop is contained within a nicked tetraloop structure.

[0824] As used herein, “treat” or “treating” refers to the act of providing care to a subject in need thereof, for example, by administering a therapeutic agent (e.g., an oligonucleotide herein) to the subject, for purposes of improving the health and/or well-being of the subject with respect to an existing condition (e.g., a disease, disorder) or to prevent or decrease the likelihood of the occurrence of a condition. In some embodiments, treatment involves reducing the frequency or severity of at least one sign, symptom or contributing factor of a condition (e.g., disease, disorder) experienced by a subject.

### EXAMPLES

[0825] While the disclosure has been described with reference to the specific embodiments set forth in the following Examples, it should be understood by those skilled in the art that various changes may be made, and equivalents may be substituted without departing from the true spirit and scope of the disclosure. Further, the following Examples are offered by way of illustration and are not intended to limit the scope of the disclosure in any manner. In addition, modifications may be made to adapt to a situation, material, composition of matter, process, process step or steps, to the objective, spirit, and scope of the disclosure. All such modifications are intended to be within the scope of the disclosure. Standard techniques well known in the art or the techniques specifically described below were utilized.

[0826] RNAi agents targeting KHK have been described and tested in vitro (e.g., WO 2015123264 and WO 2020060986). The following studies describe the identification of novel dsRNAi agents useful for reducing or inhibiting KHK expression based on in vitro and in vivo screening, including studies in non-human primates. The novel dsRNAi agents comprise 36mer sense strands and 22mer antisense strands with a stem loop having a nicked tetraloop conjugated to GalNAc moieties at the 3′end of the sense strand for reducing KHK mRNA. The presence of a nick within the stem loop provides a precut antisense strand to form a pre-processed binding substrate for the Dicer enzyme, allowing Dicer to efficiently bind and hand off the double stranded molecule to Ago2. The tetraloop provides a thermodynamically stabilizing element to prevent the loop from opening and exposing the 5′-end of the antisense strand and the 3′-end of the sense strand, thereby providing increased nuclease resistance. Accordingly, the present dsRNAi agents are particularly useful for inhibiting KHK expression in vitro and in vivo as described in the following examples.

[0827] In comparison to dsRNAi agents described in the prior art, the dsRNAi agents presented herein may, in particular, show improved in vitro and/or in vivo reduction or inhibition of KHK expression as determined on the KHK mRNA and/or KHK protein level. Such improvement may relate to the size and/or duration of the inhibitory action. Thus, for instance, for medical uses of the dsRNAi agents according to this invention, lower doses and/or lower dose frequencies may be applicable. Also, dsRNAi agents presented herein may benefit from advantageous safety and tolerability features like high specificity, low off-target effects or reduced immunogenicity.

### Example 1: Preparation of Double-Stranded RNAi Oligonucleotides

### Oligonucleotide Synthesis and Purification

[0828] The double-stranded RNAi (dsRNA) oligonucleotides described in the foregoing Examples are chemically synthesized using methods described herein. Generally, dsRNAi oligonucleotides are synthesized using solid phase oligonucleotide synthesis methods as described for 19-23mer siRNAs (see, e.g., Scaringe et al. (1990) NUCLEIC ACIDS RES. 18:5433-5441 and Usman et al. (1987) J. AM. CHEM. SOC. 109:7845-7845; see also, U.S. Pat. Nos. 5,804,683; 5,831,071; 5,998,203; 6,008,400; 6,111,086; 6,117,657; 6,353,098; 6,362,323; 6,437,117 and 6,469,158) in addition to using known phosphoramidite synthesis (see, e.g. Hughes and Ellington (2017) COLD SPRING HARB PERSPECT BIOL. 9 (1): a023812; Beaucage S.L., Caruthers M. H., Studies on Nucleotide Chemistry V: Deoxynucleoside Phosphoramidites—A New Class of Key Intermediates for Deoxypolynucleotide Synthesis, TETRAHEDRON LETT. 1981; 22:1859-62. doi: 10.1016/S0040-4039 (01) 90461-7). dsRNAi oligonucleotides having a 19mer core sequence were formatted into constructs having a 25mer sense strand and a 27mer antisense strand to allow for processing by the RNAi machinery. The 19mer core sequence is complementary to a region in the KHK mRNA.

[0829] Individual RNA strands were synthesized and HPLC purified according to standard methods (Integrated DNA Technologies; Coralville, IA). For example, RNA oligonucleotides were synthesized using solid phase phosphoramidite chemistry, deprotected and desalted on NAP-5 columns (Amersham Pharmacia Biotech; Piscataway, NJ) using standard techniques (Damha & Olgivie (1993) METHODS MOL. BIOL. 20:81-114; Wincott et al. (1995) NUCLEIC ACIDS RES. 23:2677-84). The oligomers were purified using ion-exchange high performance liquid chromatography (IE-HPLC) on an Amersham Source 15Q column (1.0 cm×25 cm; Amersham Pharmacia Biotech) using a 15 min step-linear gradient. The gradient varied from 90:10 Buffers A: B to 52:48 Buffers A: B, where Buffer A is 100 mM Tris pH 8.5 and Buffer B is 100 mM Tris pH 8.5, 1 M NaCl. Samples were monitored at 260 nm and peaks corresponding to the full-length oligonucleotide species were collected, pooled, desalted on NAP-5 columns, and lyophilized.

[0830] The purity of each oligomer was determined by capillary electrophoresis (CE) on a Beckman PACE 5000 (Beckman Coulter, Inc.; Fullerton, CA). The CE capillaries have a 100 μm inner diameter and contain ssDNA 100R Gel (Beckman-Coulter). Typically, about 0.6 nmole of oligonucleotide was injected into a capillary, run in an electric field of 444 V/cm, and was detected by UV absorbance at 260 nm. Denaturing Tris-Borate-7 M-urea running buffer was purchased from Beckman-Coulter. Oligoribonucleotides were obtained that were at least 90% pure as assessed by CE for use in experiments described below. Compound identity was verified by matrix-assisted laser desorption ionization time-of-flight (MALDI-TOF) mass spectroscopy on a Voyager DET Biospectometry Work Station (Applied Biosystems; Foster City, CA) following the manufacturer's recommended protocol. Relative molecular masses of all oligomers were obtained, often within 0.2% of expected molecular mass.

### Preparation of Duplexes

[0831] Single strand RNA oligomers were resuspended (e.g., at 100 uM concentration) in duplex buffer consisting of 100 mM potassium acetate, 30 mM HEPES, pH 7.5. Complementary sense and antisense strands were mixed in equal molar amounts to yield a final solution of, for example, 50 M duplex. Samples were heated to 100° C. for 5′ in RNA buffer (IDT) and were allowed to cool to room temperature before use. The dsRNA oligonucleotides were stored at −20° C. Single strand RNA oligomers were stored lyophilized or in nuclease-free water at −80° C.

### Example 2: Generation of KHK-Targeting Double-Stranded (DS) RNAi Oligonucleotides

Identification of KHK mRNA Target Sequences

[0832] Ketohexokinase (KHK) is an enzyme involved in fructose metabolism. KHK has two isoforms, differing by one alternative exon, with distinct substrates and mechanisms of action. The isoform KHK-A is encoded by Exon 3A whereas the KHK-C isoform is encoded by Exon 3C. To generate RNAi oligonucleotide inhibitors of KHK-A and KHK-C expression, a computer-based algorithm was used to computationally identify KHK mRNA target sequences suitable for assaying inhibition of KHK expression by the RNAi pathway. The algorithm provided RNAi oligonucleotide guide (antisense) strand sequences each having a region of complementarity to a suitable KHK target sequence of human KHK mRNA (e.g., SEQ ID NO: 1; Table 1). Some of the guide strand sequences identified by the algorithm were also complementary to the corresponding KHK target sequence of monkey and/or mouse KHK mRNA (SEQ ID NO: 2 and 3, respectively; Table 1). KHK RNAi oligonucleotides comprising a region of complementarity to homologous KHK mRNA target sequences with nucleotide sequence similarity are predicted to have the ability to target homologous KHK mRNAs.

TABLE 1
Sequences of Human, Monkey and Mouse KHK mRNA

| Species | Ref Seq # | SEQ ID NO |
|---|---|---|
| Human (Hs) | NM_006488.3 | 1 |
| Cynomolgus monkey (Mf) | XM_005576322.2 | 2 |
| Mouse (Mm) | NM_008439.4 | 3 |

[0833] RNAi oligonucleotides (formatted as DsiRNA oligonucleotides) were generated as described in Example 1 for evaluation in vitro. Each DsiRNA was generated with the same modification pattern, and each with a unique guide strand having a region of complementarity to a KHK target sequence identified by the algorithm (Table 2). Modifications for the sense and anti-sense DsiRNA included the following (X-any nucleotide; m-2′-O-methyl modified nucleotide; r-ribosyl modified nucleotide):

Sense Strand:
rXmXrXmXrXrXrXrXrXrXrXrXrXmXrXmXrXrXrXrXrXrXrXXX
Anti-sense Strand:
mXmXmXmXrXrXrXrXrXrXmXrXmXrXrXrXrXrXrXrXrXrXmXrX
mXmXmX

### In Vitro Cell-Based Assays

[0834] The ability of each of the modified DsiRNA in Table 2 to reduce KHK mRNA was measured using in vitro cell-based assays. Briefly, human hepatoma (Hep3B) cells expressing endogenous human KHK gene were transfected with each of the DsiRNAs listed in Table 2 (Sense Strand SEQ ID NOs: 4-387) at 1 nM in separate wells of a multi-well cell-culture plate. Cells were maintained for 24 hours following transfection with the modified DsiRNA, and then the amount of remaining KHK mRNA from the transfected cells was determined using TAQMAN®-based qPCR assays. Two qPCR assays, a 3′ assay (Forward-1026; TGGAGGTGGAGAAGCCA, Reverse-1157; GACCATACAAGCCCCTCAAG, Probe-1080; TGGTGTTTGTCAGCAAAGATGTGGC) and a 5′ assay (Forward-496; AGGAAGCTCTGGGAGTA, Reverse-596; CCTCCTTAGGGTACTTGTC, Probe-518; ATGGAAGAGAAGCAGATCCTGTGCG) were used to determine KHK mRNA levels as measured using PCR probes conjugated to 6-carboxy-fluorescein (FAM). Each primer pair (KHK-825 for KHK-C isoform, NM_006488.3) and KHK-All (both isoforms) (KHK-F495, KHK-F1026 for KHK-All (both isoforms) was assayed for % remaining RNA as shown in Table 2 and FIG. 1. DsiRNAs resulting in less than or equal to 10% KHK mRNA remaining in DsiRNA-transfected cells when compared to mock-transfected cells were considered DsiRNA “hits”. The Hep3B cell-based assay evaluating the ability of the DsiRNAs listed in Table 2 to inhibit KHK expression identified several candidate DsiRNAs.

[0835] Taken together, these results show that DsiRNAs designed to target human KHK mRNA inhibit KHK expression in cells, as determined by a reduced amount of KHK mRNA in DsiRNA-transfected cells relative to control cells. These results demonstrate that the nucleotide sequences comprising the DsiRNA are useful for generating RNAi oligonucleotides to inhibit KHK expression. Further, these results demonstrate that multiple KHK mRNA target sequences are suitable for the RNAi-mediated inhibition of KHK expression.

TABLE 2
Analysis of KHK mRNA in HepB3 cells

| SEQ ID NO | SEQ ID NO | | KHK-F495 | | KHK-F1026 | | KHK-825 | | % average |
|---|---|---|---|---|---|---|---|---|---|
| (Sense | (Anti-sense | | % | | % | | % | | of all |
| Strand) | Strand) | DsiRNA name | remaining | SEM | remaining | SEM | remaining | SEM | assays |
| 4 | 388 | KHK-115-154 | 28.3 | 2.4 | 33.1 | 2.7 | 30.22 | 6.148 | 30.5 |
| 5 | 389 | KHK-116-155 | 27.8 | 5.9 | 33.3 | 6.5 | 25.691 | 8.728 | 28.9 |
| 6 | 390 | KHK-117-156 | 26.7 | 9.9 | 47.5 | 14.6 | 32.656 | 13.903 | 35.6 |
| 7 | 391 | KHK-118-157 | 43.7 | 6.3 | 63.9 | 6.4 | 47.299 | 13.144 | 51.6 |
| 8 | 392 | KHK-119-158 | 34.6 | 8.6 | 57.5 | 14.7 | 22.791 | 11.895 | 38.3 |
| 9 | 393 | KHK-120-159 | 31.4 | 3.8 | 49.7 | 3.5 | 40.388 | 5.289 | 40.5 |
| 10 | 394 | KHK-121-160 | 35.8 | 4.4 | 53.2 | 5.7 | 43.359 | 8.043 | 44.1 |
| 11 | 395 | KHK-122-161 | 41.8 | 3.7 | 67.6 | 6.5 | 39.75 | 5.587 | 49.7 |
| 12 | 396 | KHK-123-162 | 49.5 | 3.7 | 66.7 | 4.6 | 41.386 | 7.102 | 52.5 |
| 13 | 397 | KHK-124-163 | 30.9 | 2.5 | 49.6 | 4.4 | 40.966 | 7.589 | 40.5 |
| 14 | 398 | KHK-125-164 | 39.5 | 3.7 | 52.5 | 5.1 | 43.748 | 9.465 | 45.3 |
| 15 | 399 | KHK-126-165 | 37.1 | 2.8 | 57.9 | 5.2 | 53.25 | 7.484 | 49.4 |
| 16 | 400 | KHK-127-166 | 38.6 | 3.1 | 63.0 | 4.3 | 45.393 | 5.073 | 49.0 |
| 17 | 401 | KHK-128-167 | 31.1 | 2.6 | 44.6 | 3.3 | 47.943 | 5.962 | 41.2 |
| 18 | 402 | KHK-179 | 28.9 | 23.1 | 81.2 | 21.2 | 62.845 | 5.928 | 57.6 |
| 19 | 403 | KHK-181-220 | 43.4 | 5.3 | 57.6 | 5.6 | 56.679 | 10.519 | 52.5 |
| 20 | 404 | KHK-182-221 | 33.8 | 1.8 | 40.4 | 3.4 | 50.153 | 10.698 | 41.5 |
| 21 | 405 | KHK-183-222 | 48.9 | 3.5 | 57.7 | 5.4 | 58.074 | 7.904 | 54.9 |
| 22 | 406 | KHK-184-223 | 37.0 | 2.6 | 38.5 | 3.0 | 49.417 | 4.396 | 41.6 |
| 23 | 407 | KHK-185-224 | 34.3 | 4.0 | 44.8 | 4.3 | 53.186 | 7.765 | 44.1 |
| 24 | 408 | KHK-186-225 | 36.1 | 4.9 | 42.4 | 5.0 | 51.087 | 6.631 | 43.2 |
| 25 | 409 | KHK-187-226 | 48.5 | 3.9 | 48.2 | 4.5 | 81.75 | 6.116 | 59.5 |
| 26 | 410 | KHK-188-227 | 50.9 | 2.8 | 50.5 | 5.6 | 75.858 | 6.936 | 59.1 |
| 27 | 411 | KHK-431-470 | 38.7 | 2.5 | 42.1 | 3.8 | 52.142 | 5.549 | 44.3 |
| 28 | 412 | KHK-432-471 | 74.1 | 38.8 | 65.5 | 11.0 | 50.476 | 11.385 | 63.3 |
| 29 | 413 | KHK-433-472 | 53.1 | 8.6 | 72.4 | 9.0 | 47.428 | 12.036 | 57.7 |
| 30 | 414 | KHK-507-545-376-218 | 23.8 | 3.1 | 31.1 | 2.5 | 84.241 | 10.972 | 46.4 |
| 31 | 415 | KHK-508-546-377-219 | 15.7 | 1.8 | 43.7 | 2.6 | 52.076 | 6.767 | 37.2 |
| 32 | 416 | KHK-509-547-378-220 | 10.9 | 2.4 | 24.5 | 4.2 | 25.526 | 5.12 | 20.3 |
| 33 | 417 | KHK-510-548-379-221 | 9.1 | 3.2 | 15.0 | 5.0 | 15.853 | 4.385 | 13.3 |
| 34 | 418 | KHK-511-549-380-222 | 10.4 | 3.0 | 23.8 | 3.5 | 17.016 | 6.998 | 17.1 |
| 35 | 419 | KHK-512-550-381-223 | 6.5 | 2.2 | 28.8 | 8.3 | 33.059 | 5.266 | 22.8 |
| 36 | 420 | KHK-513-551-382-224 | 25.4 | 8.6 | 25.2 | 3.2 | 22.514 | 5.225 | 24.4 |
| 37 | 421 | KHK-514-552-383-225 | 16.4 | 4.8 | 33.5 | 11.4 | 45.353 | 14.944 | 31.7 |
| 38 | 422 | KHK-515-553-384-226 | 66.1 | 4.5 | 47.0 | 3.6 | 150.28 | 13.471 | 87.8 |
| 39 | 423 | KHK-516-554-385-227 | 10.6 | 2.6 | 19.4 | 5.6 | 27.145 | 7.112 | 19.0 |
| 40 | 424 | KHK-517-555-386-228 | 12.0 | 3.4 | 24.7 | 6.3 | 24.382 | 9.127 | 20.4 |
| 41 | 425 | KHK-518-556-387-229 | 15.9 | 5.6 | 23.1 | 6.5 | 16.128 | 6.295 | 18.4 |
| 42 | 426 | KHK-520-558-389-231 | 8.9 | 1.9 | 15.6 | 3.4 | 20.589 | 4.844 | 15.0 |
| 43 | 427 | KHK-521-559-390-232 | 5.0 | 2.9 | 23.6 | 6.4 | 23.218 | 8.661 | 17.3 |
| 44 | 428 | KHK-522-560-391-233 | 9.7 | 1.7 | 12.3 | 2.7 | 12.226 | 3.342 | 11.4 |
| 45 | 429 | KHK-541-579 | 17.8 | 1.5 | 26.0 | 2.6 | 27.272 | 5.808 | 23.7 |
| 46 | 430 | KHK-544-582 | 22.9 | 2.7 | 18.4 | 1.9 | 59.795 | 8.985 | 33.7 |
| 47 | 431 | KHK-546-584 | 30.6 | 5.8 | 42.2 | 7.1 | 35.433 | 9.834 | 36.1 |
| 48 | 432 | KHK-547-585 | 12.2 | 1.9 | 17.8 | 2.6 | 20.431 | 7.549 | 16.8 |
| 49 | 433 | KHK-548-586 | 11.8 | 2.3 | 25.1 | 7.8 | 7.622 | 2.199 | 14.8 |
| 50 | 434 | KHK-549-587 | 12.2 | 2.0 | 15.0 | 3.6 | 14.783 | 3.155 | 14.0 |
| 51 | 435 | KHK-550-588 | 15.9 | 6.2 | 23.7 | 8.1 | 18.365 | 7.143 | 19.3 |
| 52 | 436 | KHK-551-589 | 24.7 | 4.2 | 34.8 | 6.1 | 14.11 | 5.994 | 24.5 |
| 53 | 437 | KHK-552-590 | 24.6 | 4.3 | 30.5 | 5.3 | 22.483 | 8.443 | 25.9 |
| 54 | 438 | KHK-553-591 | 16.1 | 1.6 | 27.3 | 4.3 | 21.753 | 4.168 | 21.7 |
| 55 | 439 | KHK-554-592 | 18.9 | 6.7 | 26.3 | 9.0 | 20.976 | 8.622 | 22.1 |
| 56 | 440 | KHK-555-593 | 22.2 | 7.1 | 27.2 | 10.4 | 24.612 | 15.246 | 24.7 |
| 57 | 441 | KHK-556-594 | 25.9 | 7.5 | 32.3 | 9.9 | 24.205 | 11.232 | 27.5 |
| 58 | 442 | KHK-557-595 | 15.1 | 1.9 | 18.9 | 2.2 | 29.27 | 5.8 | 21.1 |
| 59 | 443 | KHK-558-596 | 25.6 | 8.0 | 24.2 | 11.2 | 29.227 | 13.255 | 26.4 |
| 60 | 444 | KHK-559-597 | 21.3 | 1.9 | 29.7 | 1.8 | 23.268 | 4.973 | 24.8 |
| 61 | 445 | KHK-560-598 | 58.6 | 2.8 | 77.3 | 4.2 | 61.287 | 4.768 | 65.7 |
| 62 | 446 | KHK-561-599 | 14.7 | 2.2 | 28.9 | 3.3 | 23.131 | 4.888 | 22.3 |
| 63 | 447 | KHK-562-600 | 15.1 | 5.1 | 21.2 | 6.5 | 22.347 | 6.503 | 19.6 |
| 64 | 448 | KHK-563-601 | 34.7 | 1.7 | 47.5 | 2.5 | 63.417 | 8.195 | 48.5 |
| 65 | 449 | KHK-564-602 | 19.2 | 1.8 | 30.1 | 2.4 | 44.737 | 9.177 | 31.3 |
| 66 | 450 | KHK-565-603 | 55.7 | 3.1 | 73.0 | 5.6 | 106.349 | 11.887 | 78.3 |
| 67 | 451 | KHK-566-604 | 19.7 | 1.0 | 30.1 | 2.8 | 31.606 | 2.125 | 27.1 |
| 68 | 452 | KHK-567-605 | 9.9 | 0.5 | 15.4 | 1.3 | 14.15 | 2.218 | 13.2 |
| 69 | 453 | KHK-568-606 | 15.6 | 1.0 | 19.6 | 1.1 | 21.246 | 2.662 | 18.8 |
| 70 | 454 | KHK-569-607 | 45.3 | 5.4 | 53.3 | 5.9 | 42.462 | 12.958 | 47.0 |
| 71 | 455 | KHK-570-608 | 14.6 | 1.4 | 21.6 | 2.3 | 24.089 | 3.615 | 20.1 |
| 72 | 456 | KHK-571-609 | 15.4 | 1.8 | 17.4 | 1.9 | 28.812 | 4.966 | 20.6 |
| 73 | 457 | KHK-572-610 | 27.2 | 1.2 | 33.3 | 2.2 | 38.47 | 4.931 | 33.0 |
| 74 | 458 | KHK-573-611 | 20.6 | 1.7 | 23.1 | 2.1 | 50.396 | 5.757 | 31.4 |
| 75 | 459 | KHK-574-612 | 19.8 | 1.6 | 27.3 | 2.2 | 29.683 | 5.49 | 25.6 |
| 76 | 460 | KHK-575-613 | 31.1 | 1.9 | 31.2 | 2.4 | 37.359 | 5.282 | 33.2 |
| 77 | 461 | KHK-576-614 | 30.0 | 4.0 | 32.2 | 1.9 | 19.014 | 3.763 | 27.1 |
| 78 | 462 | KHK-577-615 | 20.8 | 1.9 | 31.6 | 2.8 | 22.807 | 5.999 | 25.1 |
| 79 | 463 | KHK-638-676 | 25.1 | 2.0 | 27.0 | 2.0 | 38.226 | 3.255 | 30.1 |
| 80 | 464 | KHK-641-679 | 29.0 | 1.7 | 33.5 | 2.0 | 30.662 | 5.567 | 31.0 |
| 81 | 465 | KHK-642-680 | 22.6 | 2.6 | 31.3 | 2.7 | 12.983 | 3.632 | 22.3 |
| 82 | 466 | KHK-643-681 | 39.1 | 2.1 | 41.5 | 2.4 | 38.644 | 6.762 | 39.7 |
| 83 | 467 | KHK-644-682 | 25.3 | 3.2 | 34.7 | 7.5 | 11.343 | 4.407 | 23.8 |
| 84 | 468 | KHK-645-683 | 15.9 | 5.0 | 21.0 | 3.1 | 21.433 | 1.586 | 19.5 |
| 85 | 469 | KHK-646-684 | 22.8 | 1.8 | 30.8 | 2.2 | 13.876 | 3.967 | 22.5 |
| 86 | 470 | KHK-647-685 | 38.8 | 1.5 | 41.9 | 2.4 | 32.316 | 6.062 | 37.7 |
| 87 | 471 | KHK-650-688 | 40.6 | 2.1 | 42.3 | 3.2 | 41.675 | 12.029 | 41.5 |
| 88 | 472 | KHK-676-714 | 56.0 | 2.4 | 52.8 | 2.8 | 71.792 | 10.911 | 60.2 |
| 89 | 473 | KHK-713-722 | 71.9 | 3.5 | 78.9 | 3.4 | 49.345 | 10.259 | 66.7 |
| 90 | 474 | KHK-826-835 | 87.0 | 6.4 | 101.5 | 5.1 | 76.866 | 14.977 | 88.5 |
| 91 | 475 | KHK-827-836 | 62.3 | 2.7 | 98.9 | 8.8 | 29.087 | 3.652 | 63.4 |
| 92 | 476 | KHK-829-838 | 100.3 | 4.5 | 86.8 | 5.3 | 17.67 | 3.397 | 68.3 |
| 93 | 477 | KHK-830-839 | 67.4 | 3.2 | 81.8 | 3.6 | 17.686 | 2.276 | 55.6 |
| 94 | 478 | KHK-831-840 | 61.7 | 3.4 | 69.8 | 5.2 | 13.313 | 3.649 | 48.3 |
| 95 | 479 | KHK-832-841 | 82.3 | 4.4 | 80.0 | 4.4 | 34.692 | 4.011 | 65.7 |
| 96 | 480 | KHK-857-895 | 73.2 | 10.7 | 53.0 | 13.9 | 88.908 | 21.326 | 71.7 |
| 97 | 481 | KHK-858-896 | 25.9 | 1.6 | 23.5 | 2.4 | 34.15 | 5.07 | 27.8 |
| 98 | 482 | KHK-859-897 | 42.4 | 2.4 | 51.3 | 4.2 | 47.048 | 2.926 | 46.9 |
| 99 | 483 | KHK-860-898-729-571 | 9.9 | 1.8 | 19.1 | 2.7 | 13.298 | 2.656 | 14.1 |
| 100 | 484 | KHK-861-899-730-572 | 5.0 | 0.6 | 3.3 | 0.4 | 2.869 | 0.815 | 3.7 |
| 101 | 485 | KHK-862-900 | 10.8 | 1.5 | 12.2 | 0.9 | 12.047 | 3.121 | 11.7 |
| 102 | 486 | KHK-865 | 6.3 | 0.7 | 7.6 | 0.5 | 5.2 | 0.828 | 6.4 |
| 103 | 487 | KHK-880 | 11.8 | 0.8 | 11.5 | 1.6 | 15.705 | 2.293 | 13.0 |
| 104 | 488 | KHK-882-920 | 6.5 | 0.8 | 6.5 | 0.9 | 4.934 | 1.748 | 6.0 |
| 105 | 489 | KHK-883-921 | 6.0 | 1.0 | 5.3 | 1.1 | 5.884 | 1.209 | 5.7 |
| 106 | 490 | KHK-884-922 | 11.6 | 1.4 | 13.2 | 1.4 | 8.24 | 2.55 | 11.0 |
| 107 | 491 | KHK-885-923 | 7.9 | 0.7 | 9.9 | 1.0 | 7.119 | 2.941 | 8.3 |
| 108 | 492 | KHK-886-924 | 10.7 | 7.4 | 10.9 | 7.0 | 4.814 | 1.257 | 8.8 |
| 109 | 493 | KHK-887-925 | 14.2 | 0.7 | 16.2 | 1.1 | 22.141 | 2.292 | 17.5 |
| 110 | 494 | KHK-888-926 | 13.3 | 1.1 | 17.9 | 1.4 | 17.895 | 1.465 | 16.4 |
| 111 | 495 | KHK-889-927 | 11.5 | 0.8 | 12.3 | 0.8 | 13.253 | 2.142 | 12.3 |
| 112 | 496 | KHK-890-928 | 8.5 | 0.7 | 7.1 | 0.9 | 9.332 | 1.26 | 8.3 |
| 113 | 497 | KHK-891-929 | 9.0 | 1.6 | 8.1 | 1.3 | 10.279 | 2.136 | 9.1 |
| 114 | 498 | KHK-892-930 | 6.0 | 1.0 | 9.4 | 1.2 | 7.1 | 2.124 | 7.5 |
| 115 | 499 | KHK-893-931 | 11.1 | 1.0 | 12.6 | 1.2 | 8.773 | 1.823 | 10.8 |
| 116 | 500 | KHK-894-932 | 16.1 | 2.3 | 19.0 | 1.7 | 8.757 | 1.518 | 14.6 |
| 117 | 501 | KHK-895-933 | 9.2 | 0.5 | 7.4 | 0.4 | 14.47 | 1.915 | 10.3 |
| 118 | 502 | KHK-896-934 | 10.4 | 1.1 | 10.5 | 1.5 | 19.901 | 4.905 | 13.6 |
| 119 | 503 | KHK-897-935 | 13.1 | 0.8 | 14.2 | 0.9 | 24.106 | 2.363 | 17.1 |
| 120 | 504 | KHK-898-936 | 28.7 | 1.4 | 32.0 | 2.9 | 25.261 | 2.143 | 28.7 |
| 121 | 505 | KHK-899-937 | 10.3 | 0.8 | 10.6 | 1.1 | 13.265 | 2.804 | 11.4 |
| 122 | 506 | KHK-900-938 | 9.2 | 0.9 | 10.4 | 0.8 | 8.036 | 1.468 | 9.2 |
| 123 | 507 | KHK-901-939 | 10.7 | 2.1 | 15.3 | 3.3 | 9.39 | 2.386 | 11.8 |
| 124 | 508 | KHK-902-940 | 17.6 | 1.2 | 17.4 | 2.2 | 13.271 | 2.387 | 16.1 |
| 125 | 509 | KHK-903-941 | 11.5 | 0.8 | 15.2 | 1.2 | 6.246 | 1.494 | 11.0 |
| 126 | 510 | KHK-904-942 | 16.1 | 3.0 | 20.6 | 2.5 | 12.783 | 3.392 | 16.5 |
| 127 | 511 | KHK-905-943 | 10.7 | 1.7 | 20.3 | 0.9 | 12.273 | 1.446 | 14.4 |
| 128 | 512 | KHK-906-944 | 13.2 | 2.9 | 24.9 | 2.4 | 6.582 | 2.052 | 14.9 |
| 129 | 513 | KHK-907-945 | 18.6 | 11.2 | 54.3 | 31.6 | 14.417 | 4.546 | 29.1 |
| 130 | 514 | KHK-908-946-777-619 | 26.7 | 14.6 | 46.4 | 21.7 | 125.267 | 92.567 | 66.1 |
| 131 | 515 | KHK-909-947-778-620 | 7.0 | 2.5 | 12.9 | 4.2 | 10.062 | 3.153 | 10.0 |
| 132 | 516 | KHK-910-948-779-621 | 19.9 | 3.0 | 19.2 | 2.6 | 19.331 | 4.315 | 19.5 |
| 133 | 517 | KHK-911-949-780-622 | 14.0 | 1.3 | 12.6 | 1.0 | 13.083 | 3.238 | 13.2 |
| 134 | 518 | KHK-912-950-781-623 | 20.4 | 1.1 | 18.3 | 1.3 | 21.258 | 3.237 | 20.0 |
| 135 | 519 | KHK-913-951-782-624 | 23.3 | 0.9 | 23.6 | 1.2 | 28.036 | 3.803 | 25.0 |
| 136 | 520 | KHK-914-952-783-625 | 70.2 | 6.9 | 69.6 | 6.1 | 65.824 | 7.388 | 68.5 |
| 137 | 521 | KHK-939-977 | 26.7 | 4.5 | 28.7 | 3.9 | 22.079 | 3.952 | 25.8 |
| 138 | 522 | KHK-940-978 | 14.8 | 2.5 | 18.1 | 3.2 | 11.124 | 3.4 | 14.7 |
| 139 | 523 | KHK-941-979 | 31.0 | 2.1 | 35.9 | 2.4 | 26.216 | 2.217 | 31.1 |
| 140 | 524 | KHK-942-980 | 106.5 | 6.3 | 93.3 | 6.2 | 55.665 | 9.171 | 85.2 |
| 141 | 525 | KHK-943-981 | 15.6 | 1.6 | 14.3 | 1.3 | 14.943 | 2.853 | 14.9 |
| 142 | 526 | KHK-944-982 | 68.2 | 2.2 | 64.0 | 3.2 | 71.816 | 5.94 | 68.0 |
| 143 | 527 | KHK-945-983 | 44.6 | 1.4 | 42.6 | 2.1 | 60.527 | 7.442 | 49.2 |
| 144 | 528 | KHK-946-984 | 42.2 | 2.1 | 43.0 | 2.0 | 44.669 | 6.993 | 43.3 |
| 145 | 529 | KHK-947-985 | 21.0 | 1.1 | 22.3 | 1.9 | 18.992 | 1.862 | 20.8 |
| 146 | 530 | KHK-948-986-817 | 12.7 | 1.7 | 13.3 | 2.9 | 11.454 | 2.967 | 12.5 |
| 147 | 531 | KHK-949-987-818 | 9.1 | 0.5 | 9.8 | 0.8 | 16.011 | 13.037 | 11.7 |
| 148 | 532 | KHK-950-988-819 | 9.6 | 1.2 | 8.5 | 0.8 | 12.475 | 3.586 | 10.2 |
| 149 | 533 | KHK-951-989-820 | 23.5 | 2.2 | 25.3 | 1.9 | 23.247 | 6.755 | 24.0 |
| 150 | 534 | KHK-952-990-821 | 14.5 | 0.8 | 18.3 | 1.6 | 15.126 | 4.553 | 16.0 |
| 151 | 535 | KHK-953-991-822 | 23.0 | 1.5 | 25.9 | 2.2 | 25.674 | 5.773 | 24.9 |
| 152 | 536 | KHK-954-992-823 | 14.1 | 1.5 | 16.9 | 2.7 | 17.22 | 2.41 | 16.1 |
| 153 | 537 | KHK-955-993-824 | 13.0 | 2.4 | 14.4 | 2.5 | 10.614 | 3.054 | 12.7 |
| 154 | 538 | KHK-956-994 | 11.8 | 2.7 | 11.9 | 3.0 | 17.221 | 5.593 | 13.6 |
| 155 | 539 | KHK-957-995 | 6.1 | 2.1 | 10.2 | 1.7 | 14.207 | 1.553 | 10.2 |
| 156 | 540 | KHK-958-996 | 17.4 | 3.2 | 17.9 | 1.0 | 26.913 | 3.733 | 20.7 |
| 157 | 541 | KHK-978-1016 | 43.0 | 3.9 | 50.1 | 4.1 | 41.716 | 3.912 | 45.0 |
| 158 | 542 | KHK-982-1020 | 51.8 | 2.6 | 69.1 | 5.3 | 67.745 | 3.674 | 62.9 |
| 159 | 543 | KHK-983-1021 | 57.0 | 6.9 | 60.3 | 7.5 | 60.141 | 8.62 | 59.2 |
| 160 | 544 | KHK-984-1022 | 15.4 | 2.1 | 16.8 | 2.1 | 17.339 | 3.931 | 16.5 |
| 161 | 545 | KHK-985-1023 | 17.4 | 2.3 | 22.7 | 7.7 | 16.976 | 8.222 | 19.0 |
| 162 | 546 | KHK-991-1029 | 21.4 | 2.9 | 22.7 | 3.9 | 27.54 | 9.397 | 23.9 |
| 163 | 547 | KHK-992-1030 | 11.2 | 1.3 | 11.7 | 1.4 | 18.836 | 2.724 | 13.9 |
| 164 | 548 | KHK-993-1031 | 32.3 | 5.5 | 26.5 | 4.5 | 19.635 | 5.352 | 26.1 |
| 165 | 549 | KHK-999-1037 | 20.8 | 1.8 | 24.4 | 1.8 | 26.652 | 2.248 | 24.0 |
| 166 | 550 | KHK-1000-1038 | 15.3 | 0.8 | 20.9 | 2.4 | 15.57 | 2.369 | 17.3 |
| 167 | 551 | KHK-1019-1057 | 29.8 | 4.4 | 29.5 | 4.4 | 36.461 | 4.748 | 31.9 |
| 168 | 552 | KHK-1054-1092 | 17.3 | 2.7 | 14.9 | 1.9 | 19.554 | 3.963 | 17.2 |
| 169 | 553 | KHK-1055-1093 | 21.0 | 1.7 | 22.2 | 2.4 | 20.314 | 4.35 | 21.2 |
| 170 | 554 | KHK-1057-1095 | 8.8 | 1.5 | 8.0 | 1.4 | 12.267 | 1.962 | 9.7 |
| 171 | 555 | KHK-1058-1096 | 51.6 | 3.0 | 52.5 | 4.1 | 54.022 | 5.889 | 52.7 |
| 172 | 556 | KHK-1059-1097 | 22.0 | 2.3 | 13.9 | 1.9 | 23.814 | 3.884 | 19.9 |
| 173 | 557 | KHK-1060-1098 | 14.7 | 0.7 | 10.4 | 0.8 | 26.531 | 6.527 | 17.2 |
| 174 | 558 | KHK-1061-1099 | 28.3 | 1.7 | 22.1 | 1.5 | 40.784 | 3.797 | 30.4 |
| 175 | 559 | KHK-1062-1100 | 11.6 | 0.7 | 12.0 | 1.1 | 20.499 | 2.193 | 14.7 |
| 176 | 560 | KHK-1063-1101 | 12.6 | 0.8 | 9.8 | 1.2 | 15.613 | 1.439 | 12.7 |
| 177 | 561 | KHK-1064-1102 | 12.7 | 2.2 | 9.7 | 2.5 | 18.761 | 3.098 | 13.7 |
| 178 | 562 | KHK-1065-1103 | 15.2 | 2.3 | 13.0 | 2.0 | 29.056 | 2.117 | 19.1 |
| 179 | 563 | KHK-1066-1104 | 14.0 | 1.4 | 13.8 | 2.9 | 16.23 | 2.914 | 14.7 |
| 180 | 564 | KHK-1067-1105 | 13.7 | 1.2 | 10.0 | 1.2 | 8.155 | 3.486 | 10.6 |
| 181 | 565 | KHK-1068-1106 | 14.0 | 0.8 | 11.4 | 1.1 | 28.373 | 4.283 | 17.9 |
| 182 | 566 | KHK-1069-1107 | 11.8 | 0.6 | 9.8 | 0.7 | 17.654 | 3.053 | 13.1 |
| 183 | 567 | KHK-1070-1108 | 20.2 | 2.0 | 14.4 | 2.7 | 30.393 | 6.07 | 21.7 |
| 184 | 568 | KHK-1071-1109 | 30.0 | 3.2 | 22.0 | 1.5 | 39.098 | 8.12 | 30.4 |
| 185 | 569 | KHK-1072-1110 | 14.5 | 0.7 | 12.9 | 0.8 | 41.196 | 15.367 | 22.8 |
| 186 | 570 | KHK-1073-1111 | 17.7 | 1.3 | 14.6 | 1.7 | 23.629 | 3.262 | 18.6 |
| 187 | 571 | KHK-1074-1112-943-785 | 25.1 | 2.1 | 23.0 | 2.4 | 34.784 | 6.555 | 27.6 |
| 188 | 572 | KHK-1075-1113-944-786 | 12.4 | 2.5 | 8.4 | 1.9 | 9.594 | 2.863 | 10.1 |
| 189 | 573 | KHK-1076-1114-945-787 | 9.8 | 1.0 | 7.5 | 1.0 | 11.44 | 3.242 | 9.6 |
| 190 | 574 | KHK-1077-1115-946-788 | 13.8 | 1.6 | 11.9 | 1.4 | 19.983 | 4.226 | 15.2 |
| 191 | 575 | KHK-1078-1116-947-789 | 12.2 | 1.4 | 10.2 | 1.5 | 19.236 | 3.613 | 13.9 |
| 192 | 576 | KHK-1079-1117-948-790 | 23.0 | 1.6 | 20.2 | 1.4 | 36.758 | 3.387 | 26.6 |
| 193 | 577 | KHK-1080-1118-949-791 | 12.4 | 0.7 | 10.3 | 0.9 | 23.489 | 2.532 | 15.4 |
| 194 | 578 | KHK-1081-1119-950-792 | 19.0 | 2.8 | 15.4 | 1.4 | 35.094 | 5.069 | 23.2 |
| 195 | 579 | KHK-1082-1120-951-793 | 51.6 | 12.7 | 36.2 | 7.1 | 79.445 | 13.29 | 55.8 |
| 196 | 580 | KHK-1083-1121-952-794 | 12.4 | 0.9 | 7.6 | 1.6 | 29.815 | 4.341 | 16.6 |
| 197 | 581 | KHK-1084-1122-953-795 | 17.8 | 1.5 | 15.4 | 1.3 | 34.538 | 5.134 | 22.6 |
| 198 | 582 | KHK-1085-1123-954-796 | 20.4 | 2.5 | 19.1 | 2.4 | 28.082 | 3.898 | 22.5 |
| 199 | 583 | KHK-1086-1124-955-797 | 9.8 | 1.4 | 9.1 | 1.9 | 22.862 | 5.973 | 13.9 |
| 200 | 584 | KHK-1087-1125-956-798 | 25.1 | 2.4 | 26.2 | 5.9 | 60.678 | 13 | 37.3 |
| 201 | 585 | KHK-1090-1128 | 15.7 | 2.5 | 14.2 | 4.3 | 47.765 | 6.748 | 25.9 |
| 202 | 586 | KHK-1091-1129 | 17.1 | 1.5 | 16.0 | 1.2 | 47.935 | 10.554 | 27.0 |
| 203 | 587 | KHK-1092-1130 | 59.1 | 13.1 | 81.9 | 15.1 | 116.084 | 17.529 | 85.7 |
| 204 | 588 | KHK-1093-1131 | 68.9 | 6.5 | 72.1 | 6.2 | 135.298 | 14.786 | 92.1 |
| 205 | 589 | KHK-1095-1133 | 39.3 | 2.2 | 34.2 | 2.9 | 49.369 | 9.398 | 41.0 |
| 206 | 590 | KHK-1096-1134 | 54.0 | 3.8 | 58.2 | 5.6 | 107.545 | 13.331 | 73.2 |
| 207 | 591 | KHK-1097-1135 | 26.5 | 3.4 | 22.1 | 3.0 | 39.738 | 6.746 | 29.5 |
| 208 | 592 | KHK-1099-1137 | 19.4 | 2.2 | 21.9 | 2.9 | 37.312 | 8.866 | 26.2 |
| 209 | 593 | KHK-1100-1138 | 31.5 | 3.9 | 31.8 | 4.6 | 86.882 | 29.059 | 50.1 |
| 210 | 594 | KHK-1101-1139 | 60.8 | 5.1 | 65.8 | 3.9 | 89.898 | 14.227 | 72.2 |
| 211 | 595 | KHK-1102-1140 | 29.8 | 1.9 | 25.1 | 2.9 | 49.962 | 4.639 | 34.9 |
| 212 | 596 | KHK-1103-1141 | 9.9 | 1.3 | 5.7 | 0.9 | 14.357 | 4.377 | 10.0 |
| 213 | 597 | KHK-1104-1142 | 7.9 | 0.5 | 5.3 | 0.7 | 14.498 | 2.508 | 9.2 |
| 214 | 598 | KHK-1106-1144 | 12.0 | 2.1 | 6.8 | 2.4 | 17.615 | 5.575 | 12.1 |
| 215 | 599 | KHK-1107-1145 | 7.6 | 1.5 | 3.5 | 1.2 | 12.097 | 3.884 | 7.7 |
| 216 | 600 | KHK-1135-1173 | 9.8 | 2.7 | 6.3 | 2.1 | 20.368 | 5.935 | 12.2 |
| 217 | 601 | KHK-1136-1174 | 55.0 | 8.2 | 57.6 | 8.7 | 51.67 | 14.619 | 54.8 |
| 218 | 602 | KHK-1137-1175 | 6.9 | 1.5 | 5.5 | 0.9 | 14.082 | 4.459 | 8.8 |
| 219 | 603 | KHK-1138-1176 | 3.4 | 1.2 | 2.7 | 1.0 | 20.618 | 4.034 | 8.9 |
| 220 | 604 | KHK-1139-1177 | 14.2 | 4.2 | 10.3 | 2.6 | 45.243 | 8.325 | 23.2 |
| 221 | 605 | KHK-1140-1178 | 22.3 | 7.0 | 14.9 | 4.7 | 58.511 | 10.307 | 31.9 |
| 222 | 606 | KHK-1141-1179 | 16.8 | 4.6 | 18.2 | 4.1 | 34.609 | 7.425 | 23.2 |
| 223 | 607 | KHK-1142-1180 | 10.0 | 4.1 | 8.0 | 2.3 | 33.362 | 7.336 | 17.1 |
| 224 | 608 | KHK-1143-1181 | 13.7 | 2.2 | 12.5 | 4.2 | 28.204 | 4.236 | 18.1 |
| 225 | 609 | KHK-1144-1182 | 11.7 | 2.1 | 14.6 | 4.6 | 49.769 | 18.354 | 25.3 |
| 226 | 610 | KHK-1145-1183 | 19.0 | 6.3 | 22.7 | 6.7 | 51.464 | 20.568 | 31.1 |
| 227 | 611 | KHK-1146-1184 | 16.8 | 4.7 | 14.7 | 5.5 | 71.937 | 37.067 | 34.5 |
| 228 | 612 | KHK-1147-1185 | 9.0 | 1.6 | 9.1 | 1.1 | 11.22 | 4.674 | 9.7 |
| 229 | 613 | KHK-1148-1186 | 8.8 | 1.7 | 6.0 | 1.8 | 18.481 | 8.166 | 11.1 |
| 230 | 614 | KHK-1149-1187 | 20.1 | 3.1 | 18.3 | 2.8 | 36.481 | 11.397 | 24.9 |
| 231 | 615 | KHK-1153-1191 | 24.4 | 3.7 | 20.5 | 3.0 | 29.434 | 6.394 | 24.8 |
| 232 | 616 | KHK-1154-1192 | 11.9 | 2.5 | 8.9 | 2.2 | 22.093 | 6.996 | 14.3 |
| 233 | 617 | KHK-1157-1195 | 14.5 | 2.2 | 11.9 | 2.2 | 26.024 | 4.864 | 17.5 |
| 234 | 618 | KHK-1158-1196 | 9.3 | 1.4 | 5.0 | 1.5 | 8.547 | 5.09 | 7.6 |
| 235 | 619 | KHK-1159-1197 | 7.3 | 1.3 | 11.6 | 1.3 | 18.971 | 4.052 | 12.6 |
| 236 | 620 | KHK-1161-1199 | 9.9 | 1.0 | 4.8 | 0.7 | 16.083 | 3.57 | 10.3 |
| 237 | 621 | KHK-1163-1201 | 13.7 | 1.3 | 11.9 | 1.4 | 28.564 | 6.393 | 18.0 |
| 238 | 622 | KHK-1164-1202 | 14.6 | 2.9 | 10.0 | 2.5 | 17.654 | 4.993 | 14.1 |
| 239 | 623 | KHK-1232-1270 | 12.0 | 2.4 | 13.2 | 2.6 | 29.824 | 4.644 | 18.4 |
| 240 | 624 | KHK-1278-1316-1147-989 | 14.0 | 2.6 | 8.5 | 3.2 | 16.096 | 5.812 | 12.9 |
| 241 | 625 | KHK-1279-1317-1148-990 | 9.4 | 2.2 | 8.2 | 2.0 | 23.969 | 10.352 | 13.9 |
| 242 | 626 | KHK-1280-1318-1149-991 | 4.5 | 1.4 | 5.3 | 1.2 | 11.007 | 1.786 | 6.9 |
| 243 | 627 | KHK-1281-1319-1150-992 | 4.0 | 1.3 | 7.4 | 2.3 | 30.368 | 6.698 | 13.9 |
| 244 | 628 | KHK-1282-1320-1151-993 | 10.0 | 1.5 | 9.4 | 2.9 | 10.4 | 2.173 | 10.0 |
| 245 | 629 | KHK-1283-1321 | 23.7 | 3.6 | 25.9 | 5.1 | 20.361 | 6.111 | 23.3 |
| 246 | 630 | KHK-1284-1322 | 17.5 | 1.2 | 15.1 | 1.9 | 23.591 | 3.59 | 18.8 |
| 247 | 631 | KHK-1285-1323 | 15.8 | 1.4 | 19.5 | 1.2 | 13.69 | 2.902 | 16.3 |
| 248 | 632 | KHK-1286-1324 | 17.7 | 2.8 | 18.7 | 2.8 | 18.507 | 3.994 | 18.3 |
| 249 | 633 | KHK-1287-1325 | 9.2 | 3.3 | 7.7 | 3.0 | 10.381 | 3.571 | 9.1 |
| 250 | 634 | KHK-1288-1326 | 8.4 | 2.9 | 3.8 | 1.7 | 11.461 | 3.398 | 7.9 |
| 251 | 635 | KHK-1289-1327 | 8.4 | 2.9 | 6.4 | 4.6 | 11.992 | 3.025 | 8.9 |
| 252 | 636 | KHK-1290-1328 | 8.7 | 1.5 | 6.7 | 1.2 | 8.926 | 3.258 | 8.1 |
| 253 | 637 | KHK-1291-1329 | 6.9 | 0.7 | 3.8 | 1.0 | 7.55 | 2.469 | 6.1 |
| 254 | 638 | KHK-1292-1330 | 17.7 | 1.1 | 12.8 | 1.2 | 30.785 | 7.501 | 20.5 |
| 255 | 639 | KHK-1293-1331 | 11.6 | 1.3 | 9.7 | 1.6 | 15.795 | 2.45 | 12.4 |
| 256 | 640 | KHK-1294-1332 | 25.7 | 1.4 | 34.2 | 2.2 | 33.058 | 7.279 | 31.0 |
| 257 | 641 | KHK-1295-1333 | 13.1 | 1.5 | 12.2 | 2.1 | 15.793 | 3.001 | 13.7 |
| 258 | 642 | KHK-1297-1335 | 21.1 | 1.3 | 21.8 | 1.5 | 24.699 | 4.755 | 22.5 |
| 259 | 643 | KHK-1323-1361 | 49.4 | 8.1 | 57.3 | 8.3 | 44.887 | 11.548 | 50.5 |
| 260 | 644 | KHK-1325-1363 | 38.7 | 2.6 | 32.1 | 3.3 | 28.739 | 4.127 | 33.2 |
| 261 | 645 | KHK-1326-1364 | 10.7 | 0.8 | 8.2 | 0.9 | 20.863 | 2.809 | 13.3 |
| 262 | 646 | KHK-1327-1365 | 54.1 | 2.2 | 52.2 | 3.4 | 94.086 | 19.883 | 66.8 |
| 263 | 647 | KHK-1328-1366 | 40.5 | 1.7 | 45.3 | 3.8 | 44.867 | 7.194 | 43.5 |
| 264 | 648 | KHK-1329-1367 | 17.2 | 1.4 | 14.4 | 1.0 | 32.257 | 2.561 | 21.3 |
| 265 | 649 | KHK-1330-1368 | 15.6 | 1.2 | 18.9 | 1.9 | 19.171 | 3.863 | 17.9 |
| 266 | 650 | KHK-1331-1369 | 15.4 | 1.6 | 12.9 | 2.0 | 42.066 | 5.461 | 23.4 |
| 267 | 651 | KHK-1332-1370 | 12.0 | 0.8 | 8.5 | 0.9 | 10.488 | 3.467 | 10.3 |
| 268 | 652 | KHK-1333-1371 | 7.2 | 0.9 | 3.7 | 0.9 | 8.179 | 2.058 | 6.3 |
| 269 | 653 | KHK-1334-1372 | 8.7 | 1.5 | 6.5 | 1.0 | 7.49 | 0.985 | 7.6 |
| 270 | 654 | KHK-1335-1373 | 9.7 | 0.6 | 5.2 | 1.1 | 9.403 | 1.153 | 8.1 |
| 271 | 655 | KHK-1336-1374 | 10.0 | 1.8 | 5.2 | 1.4 | 14.512 | 2.647 | 9.9 |
| 272 | 656 | KHK-1385-1423 | 47.5 | 3.5 | 49.0 | 4.8 | 44.122 | 7.678 | 46.9 |
| 273 | 657 | KHK-1387-1425 | 14.4 | 2.1 | 15.9 | 3.0 | 22.666 | 4.122 | 17.7 |
| 274 | 658 | KHK-1388-1426 | 27.0 | 2.9 | 28.2 | 3.3 | 34.575 | 4.985 | 29.9 |
| 275 | 659 | KHK-1389-1427 | 25.1 | 3.0 | 29.5 | 2.8 | 18.759 | 3.577 | 24.5 |
| 276 | 660 | KHK-1538-1588 | 81.1 | 15.3 | 73.7 | 17.3 | 71.289 | 16.403 | 75.3 |
| 277 | 661 | KHK-1540-1590 | 46.8 | 4.2 | 35.5 | 4.6 | 23.533 | 8.593 | 35.3 |
| 278 | 662 | KHK-1542-1592 | 80.6 | 4.7 | 89.1 | 3.3 | 85.445 | 7.942 | 85.0 |
| 279 | 663 | KHK-1665-1708 | 84.8 | 4.3 | 86.6 | 8.9 | 116.186 | 21.343 | 95.8 |
| 280 | 664 | KHK-1666-1709 | 97.0 | 2.5 | 99.6 | 3.9 | 115.899 | 10.593 | 104.2 |
| 281 | 665 | KHK-1667-1710 | 99.5 | 4.4 | 109.4 | 5.7 | 123.463 | 8.991 | 110.8 |
| 282 | 666 | KHK-1707-1750 | 91.1 | 3.5 | 107.3 | 6.3 | 123.75 | 26.01 | 107.4 |
| 283 | 667 | KHK-1708-1751 | 72.5 | 5.7 | 85.8 | 8.2 | 76.118 | 10.985 | 78.1 |
| 284 | 668 | KHK-1709-1752 | 136.2 | 5.8 | 114.5 | 5.9 | 75.202 | 14.025 | 108.7 |
| 285 | 669 | KHK-1869-1918 | 118.1 | 21.1 | 111.2 | 20.6 | 97.088 | 18.195 | 108.8 |
| 286 | 670 | KHK-1870-1919 | 90.2 | 8.7 | 83.2 | 11.2 | 87.62 | 22.519 | 87.0 |
| 287 | 671 | KHK-1871-1920 | 81.7 | 4.6 | 80.6 | 4.6 | 119.805 | 13.019 | 94.1 |
| 288 | 672 | KHK-1872-1921 | 94.5 | 4.4 | 87.4 | 5.7 | 74.492 | 13.782 | 85.4 |
| 289 | 673 | KHK-1873-1922 | 93.2 | 5.4 | 90.9 | 4.6 | 88.62 | 13.98 | 90.9 |
| 290 | 674 | KHK-1874-1923 | 93.2 | 6.3 | 90.7 | 4.9 | 74.793 | 8.913 | 86.2 |
| 291 | 675 | KHK-1875-1924 | 86.5 | 8.5 | 76.3 | 8.2 | 45.965 | 7.621 | 69.6 |
| 292 | 676 | KHK-1876-1925 | 73.7 | 9.7 | 61.1 | 8.7 | 34.813 | 6.807 | 56.6 |
| 293 | 677 | KHK-1877-1926 | 72.7 | 3.9 | 51.0 | 5.3 | 45.122 | 9.468 | 56.3 |
| 294 | 678 | KHK-1878-1927 | 75.8 | 4.8 | 79.7 | 8.0 | 54.716 | 8.031 | 70.1 |
| 295 | 679 | KHK-1879-1928 | 90.6 | 8.4 | 77.0 | 9.0 | 86.62 | 13.219 | 84.7 |
| 296 | 680 | KHK-1880-1929 | 100.4 | 8.5 | 84.5 | 9.8 | 85.501 | 13.022 | 90.1 |
| 297 | 681 | KHK-1900-1949 | 104.9 | 12.1 | 96.5 | 15.3 | 70.712 | 8.039 | 90.7 |
| 298 | 682 | KHK-1905-1954 | 71.4 | 17.0 | 71.0 | 22.1 | 35.273 | 14.001 | 59.2 |
| 299 | 683 | KHK-1971-2025 | 77.5 | 25.4 | 128.3 | 28.3 | 34.399 | 9.559 | 80.1 |
| 300 | 684 | KHK-1974-2028 | 74.2 | 6.0 | 64.4 | 7.7 | 50.763 | 6.122 | 63.1 |
| 301 | 685 | KHK-1975-2029 | 80.8 | 7.8 | 80.5 | 7.1 | 55.779 | 10.606 | 72.3 |
| 302 | 686 | KHK-1976-2030 | 69.2 | 6.8 | 73.5 | 8.5 | 53.873 | 16.663 | 65.5 |
| 303 | 687 | KHK-1978-2032 | 73.7 | 10.3 | 73.6 | 10.0 | 57.334 | 7.876 | 68.2 |
| 304 | 688 | KHK-1979-2033 | 81.2 | 9.5 | 95.1 | 13.6 | 43.016 | 8.767 | 73.1 |
| 305 | 689 | KHK-2032-2086 | 94.2 | 6.3 | 124.6 | 9.4 | 99.842 | 10.374 | 106.2 |
| 306 | 690 | KHK-2035-2089 | 66.5 | 6.2 | 72.2 | 14.5 | 47.134 | 6.316 | 61.9 |
| 307 | 691 | KHK-2036-2090 | 82.4 | 9.1 | 110.4 | 15.5 | 56.532 | 12.458 | 83.1 |
| 308 | 692 | KHK-2037-2091 | 88.9 | 8.1 | 72.5 | 7.9 | 48.451 | 10.859 | 70.0 |
| 309 | 693 | KHK-2038-2092 | 74.2 | 3.6 | 58.7 | 4.7 | 44.437 | 4.32 | 59.1 |
| 310 | 694 | KHK-2039-2093 | 75.1 | 5.3 | 76.3 | 8.1 | 51.597 | 6.117 | 67.7 |
| 311 | 695 | KHK-2040-2094 | 75.9 | 8.5 | 70.0 | 11.2 | 57.499 | 6.477 | 67.8 |
| 312 | 696 | KHK-2041-2095 | 80.5 | 4.1 | 78.1 | 3.5 | 78.593 | 10.192 | 79.1 |
| 313 | 697 | KHK-2042-2096 | 79.1 | 5.2 | 84.7 | 4.0 | 88.699 | 8.352 | 84.2 |
| 314 | 698 | KHK-2043-2097 | 72.0 | 3.8 | 70.0 | 2.7 | 83.791 | 8.891 | 75.3 |
| 315 | 699 | KHK-2044-2098 | 37.6 | 12.9 | 32.3 | 13.4 | 30.83 | 15.258 | 33.6 |
| 316 | 700 | KHK-2045-2099 | 101.3 | 8.7 | 87.4 | 11.3 | 54.839 | 12.261 | 81.2 |
| 317 | 701 | KHK-2067-2121 | 88.2 | 5.1 | 78.4 | 2.6 | 75.916 | 8.438 | 80.8 |
| 318 | 702 | KHK-2069-2123 | 83.1 | 3.7 | 84.9 | 5.2 | 63.679 | 10.343 | 77.2 |
| 319 | 703 | KHK-2091-2145 | 83.8 | 5.4 | 87.1 | 8.9 | 53.463 | 10.34 | 74.8 |
| 320 | 704 | KHK-2092-2146 | 85.4 | 6.2 | 89.7 | 7.8 | 68.656 | 5.01 | 81.3 |
| 321 | 705 | KHK-2093-2147 | 102.7 | 21.4 | 65.4 | 19.9 | 71.693 | 14.857 | 79.9 |
| 322 | 706 | KHK-2094-2148 | 88.8 | 6.4 | 94.1 | 6.7 | 53.85 | 10.392 | 78.9 |
| 323 | 707 | KHK-2095-2149 | 76.2 | 21.4 | 97.2 | 25.9 | 47.372 | 14.735 | 73.6 |
| 324 | 708 | KHK-2096-2150 | 87.9 | 16.4 | 78.6 | 13.2 | 49.454 | 14.398 | 72.0 |
| 325 | 709 | KHK-2105 | 92.1 | 7.7 | 90.8 | 11.5 | 97.683 | 10.156 | 93.5 |
| 326 | 710 | KHK-2148-2197 | 86.5 | 5.8 | 79.3 | 16.0 | 76.198 | 8.142 | 80.7 |
| 327 | 711 | KHK-2149-2198 | 71.3 | 3.7 | 73.8 | 4.2 | 55.558 | 6.731 | 66.9 |
| 328 | 712 | KHK-2150-2199 | 92.1 | 7.1 | 97.5 | 4.9 | 75.703 | 6.126 | 88.4 |
| 329 | 713 | KHK-2151-2200 | 96.2 | 3.7 | 108.0 | 10.3 | 91.908 | 5.852 | 98.7 |
| 330 | 714 | KHK-2152-2201 | 78.7 | 6.5 | 74.7 | 9.6 | 42.766 | 6.332 | 65.4 |
| 331 | 715 | KHK-2153-2202 | 95.2 | 14.8 | 73.9 | 13.1 | 47.169 | 10.902 | 72.1 |
| 332 | 716 | KHK-2154-2203 | 114.1 | 11.9 | 92.3 | 7.2 | 61.728 | 10.943 | 89.4 |
| 333 | 717 | KHK-2155-2204 | 92.1 | 8.4 | 83.1 | 3.8 | 119.537 | 11.18 | 98.2 |
| 334 | 718 | KHK-2156-2205 | 104.7 | 5.4 | 91.6 | 4.7 | 148.445 | 15.208 | 114.9 |
| 335 | 719 | KHK-2157-2206 | 94.2 | 8.4 | 92.0 | 10.4 | 68.735 | 7.132 | 85.0 |
| 336 | 720 | KHK-2159-2208 | 85.4 | 4.5 | 78.4 | 6.2 | 62.397 | 10.642 | 75.4 |
| 337 | 721 | KHK-2160-2209 | 72.7 | 1.9 | 81.8 | 5.3 | 56.483 | 11.255 | 70.3 |
| 338 | 722 | KHK-2161-2210 | 93.7 | 14.6 | 74.3 | 10.9 | 18.252 | 5.102 | 62.1 |
| 339 | 723 | KHK-2162-2211 | 106.7 | 11.3 | 127.3 | 17.9 | 53.455 | 15.254 | 95.8 |
| 340 | 724 | KHK-2163-2212 | 79.5 | 8.2 | 91.6 | 6.4 | 49.199 | 6.236 | 73.5 |
| 341 | 725 | KHK-2164-2213 | 101.1 | 13.4 | 115.2 | 20.4 | 84.893 | 29.662 | 100.4 |
| 342 | 726 | KHK-2165-2214 | 97.0 | 10.8 | 102.1 | 9.9 | 76.079 | 10.525 | 91.7 |
| 343 | 727 | KHK-2166-2215 | 91.6 | 20.4 | 89.3 | 22.7 | 55.353 | 11.894 | 78.8 |
| 344 | 728 | KHK-2170-2219 | 75.9 | 4.5 | 89.7 | 4.6 | 68.461 | 8.991 | 78.0 |
| 345 | 729 | KHK-2196-2245 | 60.3 | 2.9 | 65.1 | 4.4 | 43.35 | 5.951 | 56.3 |
| 346 | 730 | KHK-2197-2246 | 85.4 | 8.4 | 98.9 | 9.4 | 65.81 | 6.865 | 83.4 |
| 347 | 731 | KHK-2198-2247 | 89.4 | 15.0 | 108.1 | 10.3 | 44.371 | 7.323 | 80.6 |
| 348 | 732 | KHK-2199-2248 | 97.2 | 14.8 | 91.3 | 16.1 | 49.493 | 8.874 | 79.3 |
| 349 | 733 | KHK-2200-2249 | 104.7 | 10.7 | 111.8 | 13.5 | 47.327 | 5.488 | 87.9 |
| 350 | 734 | KHK-2201-2250 | 100.3 | 11.7 | 102.7 | 13.8 | 52.984 | 11.652 | 85.3 |
| 351 | 735 | KHK-2205 | 96.9 | 17.0 | 88.0 | 10.9 | 55.021 | 8.208 | 80.0 |
| 352 | 736 | KHK-2238 | 89.1 | 8.0 | 99.6 | 8.2 | 113.917 | 11.636 | 100.9 |
| 353 | 737 | KHK-2260-2309 | 111.5 | 13.2 | 110.2 | 11.9 | 95.452 | 20.407 | 105.7 |
| 354 | 738 | KHK-2261-2310 | 103.6 | 9.1 | 106.9 | 12.4 | 97.581 | 15.894 | 102.7 |
| 355 | 739 | KHK-2262-2311 | 141.3 | 14.6 | 132.9 | 11.8 | 112.052 | 19.366 | 128.7 |
| 356 | 740 | KHK-2263-2312 | 104.0 | 10.5 | 80.5 | 11.4 | 59.852 | 7.342 | 81.4 |
| 357 | 741 | KHK-2264-2313 | 100.7 | 17.1 | 88.6 | 15.5 | 53.023 | 12.056 | 80.8 |
| 358 | 742 | KHK-2265-2314 | 103.2 | 11.2 | 103.8 | 11.9 | 60.929 | 8.309 | 89.3 |
| 359 | 743 | KHK-2266-2315 | 119.8 | 8.9 | 110.3 | 8.5 | 66.846 | 9.19 | 99.0 |
| 360 | 744 | KHK-2299 | 77.7 | 3.2 | 72.0 | 5.9 | 69.804 | 11.442 | 73.2 |
| 361 | 745 | KHK-2317-2366 | 81.2 | 3.0 | 84.4 | 7.7 | 66.04 | 7.299 | 77.2 |
| 362 | 746 | KHK-2318-2367 | 86.6 | 3.7 | 97.0 | 5.2 | 66.519 | 4.573 | 83.4 |
| 363 | 747 | KHK-2319-2368 | 127.5 | 12.5 | 102.9 | 8.9 | 82.338 | 11.524 | 104.2 |
| 364 | 748 | KHK-2320-2369 | 98.9 | 11.1 | 94.2 | 15.6 | 59.154 | 17.115 | 84.1 |
| 365 | 749 | KHK-2321-2370 | 127.6 | 13.8 | 127.6 | 16.5 | 81.979 | 19.313 | 112.4 |
| 366 | 750 | KHK-2322-2371 | 83.3 | 9.1 | 68.5 | 8.6 | 78.252 | 14.344 | 76.7 |
| 367 | 751 | KHK-2323-2372 | 83.2 | 7.3 | 79.8 | 7.7 | 57.202 | 9.062 | 73.4 |
| 368 | 752 | KHK-2324-2373 | 95.0 | 3.0 | 101.4 | 5.2 | 118.194 | 16.285 | 104.9 |
| 369 | 753 | KHK-2325-2374 | 123.0 | 15.6 | 153.7 | 23.1 | 188.498 | 24.768 | 155.1 |
| 370 | 754 | KHK-2326-2375 | 94.5 | 12.0 | 101.2 | 8.2 | 110.056 | 29.627 | 101.9 |
| 371 | 755 | KHK-2332 | 96.2 | 11.9 | 122.2 | 10.2 | 120.096 | 15.829 | 112.8 |
| 372 | 756 | KHK-2333 | 97.9 | 12.7 | 73.0 | 9.9 | 50.041 | 16.617 | 73.7 |
| 373 | 757 | KHK-2335 | 104.4 | 9.0 | 81.2 | 7.5 | 33.77 | 6.814 | 73.1 |
| 374 | 758 | KHK-2340 | 64.4 | 14.3 | 45.7 | 12.3 | 34.661 | 10.468 | 48.2 |
| 375 | 759 | KHK-2341 | 61.9 | 10.6 | 53.7 | 6.9 | 43.579 | 8.14 | 53.1 |
| 376 | 760 | KHK-2346 | 104.5 | 9.2 | 92.5 | 12.6 | 104.386 | 32.315 | 100.4 |
| 377 | 761 | KHK-2352 | 78.5 | 6.7 | 83.6 | 8.0 | 97.544 | 18.168 | 86.6 |
| 378 | 762 | KHK-2358 | 78.8 | 7.0 | 75.7 | 9.9 | 64.974 | 13.327 | 73.1 |
| 379 | 763 | KHK-2359 | 89.5 | 9.0 | 91.8 | 8.2 | 71.314 | 7.358 | 84.2 |
| 380 | 764 | KHK-2360 | 132.4 | 26.2 | 82.8 | 8.7 | 159.973 | 15.729 | 125.0 |
| 381 | 765 | KHK-2361 | 110.4 | 8.5 | 87.7 | 7.8 | 87.634 | 7.799 | 95.3 |
| 382 | 766 | KHK-2362 | 92.5 | 12.8 | 72.7 | 7.2 | 84.427 | 12.833 | 83.2 |
| 383 | 767 | KHK-2363 | 100.4 | 9.2 | 76.1 | 14.4 | 52.066 | 18.068 | 76.2 |
| 384 | 768 | KHK-2364 | 116.4 | 9.8 | 88.5 | 8.3 | 120.931 | 26.855 | 108.6 |
| 385 | 769 | KHK-2365 | 100.5 | 5.7 | 92.9 | 5.2 | 132.668 | 7.14 | 108.7 |
| 386 | 770 | KHK-2366 | 129.3 | 7.2 | 113.5 | 5.7 | 135.163 | 16.2 | 126.0 |
| 387 | 771 | KHK-2367 | 123.3 | 9.0 | 105.9 | 9.2 | 136.356 | 9.025 | 121.9 |

### Example 3: RNAi Oligonucleotide Inhibition of Both KHK Isoforms In Vivo

[0836] The in vitro screening assay in Example 2 validated the ability of KHK DsiRNA to knock-down both isoforms of KHK (KHK-All). To confirm the ability of the RNAi oligonucleotides to knockdown both KHK-A and KHK—C isoforms, a side-by-side HDI mouse model was used. First, the nucleotide sequences comprising a subset of the 384 DsiRNAs identified in Example 2, and that recognize human/NHP-conserved KHK, were used to generate corresponding double-stranded RNAi oligonucleotides comprising a nicked tetraloop GalNAc-conjugated structure (referred to herein as “GalNAc-conjugated KHK oligonucleotides” or “GalNAc-KHK constructs”) having a 36-mer passenger strand and a 22-mer guide strand (Table 3). Specifically, to generate the 22-mer guide strand, the 19-mer core antisense strand sequences used in Example 2 (e.g., SEQ ID NOs: 948-953) were modified to have a phosphorylated uracil at the 5′ end and two guanines at the 3′ end. To generate the 36-mer passenger strand, an adenine corresponding to the phosphorylated uracil in the antisense strand and a 16-mer stem loop (SEQ ID NO: 871) were added to the 3′ end of the 19-mer core sense strand sequences used in Example 2 (e.g., SEQ ID NOs: 942-947). Further, the nucleotide sequences comprising the passenger strand and guide strand of the GalNAc-conjugated KHK oligonucleotides have a distinct pattern of modified nucleotides and phosphorothioate linkages (e.g., see FIG. 2A, FIG. 2B and Table 3 for schematics of the generic structure and key of chemical modifications; referred to herein as Low-2′-Fluoro (3PS) and Low-2′-Fluoro (2PS), respectively, together as the Low-2′-Fluoro pattern for GalNAc-conjugated KHK oligonucleotides). The three adenosine nucleotides comprising the tetraloop are each conjugated to a GalNAc moiety (CAS #: 14131-60-3). The modification pattern is represented below in two interchangeable modification keys.

Low-2′-Fluoro (3PS) Modification Pattern for
GalNAc-KHK Constructs (5′ Antisense 3PS)
Sense Strand:
5′-mX-S-mX-mX-mX-mX-mX-mX-fX-fX-fX-fX-mX-mX-
mX-mX-mX-mX-mX-mX-mX-mX-mX-mX-mX-mX-mX-mX-
[ademA-GalNAc]- [ademA-GalNAc]- [ademA-
GalNAc]-mX-mX-mX-mX-mX-mX-3′.
Hybridized to:
Antisense Strand:
5′-[MePhosphonate-4O-mX]-S-fX-S-fX-S-fX-fX-
mX-fX-mX-mX-fX-mX-mX-mX-fX-mX-mX-mX-mX-mX-
mX-S-mX-S-mX-3′
(Modification key: Table 3).
Or, represented as:
Sense Strand:
[mXs][mX][mX][mX][mX][mX][mX][fX][fX][fX]
[fX][mX][mX][mX][mX][mX][mX][mX][mX][mX]
[mX][mX][mX][mX][mX][mX][mX][ademA-GalNAc]
[ademA-GalNAc][ademA-GalNAc][mX][mX][mX]
[mX][mX][mX]
Hybridized to:
Antisense Strand:
[MePhosphonate-4O-mXs][fXs][fXs][fX][fX]
[mX][fX][mX][mX][fX][mX][mX][mX][fX][mX]
[mX][mX][mX][mX][mXs][mXs][mX]
(Modification key: Table 3).
Low-2′Fluoro (2PS) Modification Pattern
for GalNAc-KHK Constructs (5′ Antisense
2PS)
Sense Strand:
5′-mX-S-mX-mX-mX-mX-mX-mX-fX-fX-fX-fX-mX-
mX-mX-mX-mX-mX-mX-mX-mX-mX-mX-mX-mX-mX-
mX-mX-[ademA-GalNAc]- [ademA-GalNAc]-
[ademA-GalNAc]-mX-mX-mX-mX-mX-mX-3′.
Hybridized to:
Antisense Strand:
5′-[MePhosphonate-4O-mX]-S-fX-S-fX-fX-fX-
mX-fX-mX-mX-fX-mX-mX-mX-fX-mX-mX-mX-mX-
mX-mX-S-mX-S-mX-3′
(Modification key: Table 3).
Or, represented as:
Sense Strand:
[mXs][mX][mX][mX][mX][mX][mX][fX][fX][fX]
[fX][mX][mX][mX][mX][mX][mX][mX][mX][mX]
[mX][mX][mX][mX][mX][mX][mX][ademA-GalNAc]
[ademA-GalNAc][ademA-GalNAc][mX][mX][mX]
[mX][mX][mX]
Hybridized to:
Antisense Strand:
[MePhosphonate-4O-mXs][fXs][fX][fX][fX]
[mX][fX][mX][mX][fX][mX][mX][mX][fX][mX]
[mX][mX][mX][mX][mXs][mXs][mX]

TABLE 3
Modification Key

| | |
|---|---|
| Symbol | Modification/linkage |

Key 1

| | |
|---|---|
| mX | 2′-O-methyl modified nucleotide |
| fX | 2′-fluoro modified nucleotide |
| -S- | phosphorothioate linkage |
| — | phosphodiester linkage |
| [MePhosphonate- | 5′-methoxyphosphonate-4′-oxy modified nucleotide |
| 4O-mX] | |
| ademA-GalNAc | GalNAc attached to an adenine nucleotide |

Key 2

| | |
|---|---|
| [mXs] | 2′-O-methyl modified nucleotide with a |
| | phosphorothioate linkage to the neighboring nucleotide |
| [fXs] | 2′-fluoro modified nucleotide with a |
| | phosphorothioate linkage to the neighboring nucleotide |
| [mX] | 2′-O-methyl modified nucleotide with phosphodiester |
| | linkages to neighboring nucleotides |
| [fX] | 2′-fluoro modified nucleotide with phosphodiester |
| | linkages to neighboring nucleotides |

[0837] The GalNAc-KHK constructs were then used to evaluate inhibition efficacy in mice. Specifically, 6-8-week-old female CD-1 mice (n=5) were subcutaneously administered the indicated GalNAc-conjugated KHK oligonucleotides (Table 4) at a dose of 2 mg/kg formulated in PBS. A control group of mice (n=5) were administered only PBS. Three days later (72 hours), the mice were hydrodynamically injected (HDI) either with a DNA plasmid (pCMV6-KHK-C, Cat #: RC223488, OriGene) encoding the full human KHK gene (NM_006488.3) (25 μg) or plasmid (pCMV6-KHK-A, Cat #;RC202424, OriGene) encoding the full human KHK-A gene (NM_000221) under control of a ubiquitous cytomegalovirus (CMV) promoter sequence. One day after introduction of the DNA plasmid, liver samples from HDI mice were collected. The values were normalized for transfection efficiency using the NeoR gene included on the DNA plasmid.

[0838] Total RNA isolated from mouse livers were used to assess relative KHK mRNA expressions by qRT-PCR. The TaqMan RT-qPCR probes from Life Technologies were used to evaluate [3′ assay (Forward-1026; TGGAGGTGGAGAAGCCA (SEQ ID NO: 865), Reverse-1157; GACCATACAAGCCCCTCAAG (SEQ ID NO:866), Probe-1080; TGGTGTTTGTCAGCAAAGATGTGGC (SEQ ID NO:867)) and a 5′ assay (Forward-496; AGGAAGCTCTGGGAGTA (SEQ ID NO: 868), Reverse-596; CCTCCTTAGGGTACTTGTC (SEQ ID NO: 869), Probe-518; ATGGAAGAGAAGCAGATCCTGTGCG (SEQ ID NO: 870))]. The values were normalized for transfection efficiency using the NeoR gene included on the DNA plasmid. HDI mice were generated as described above but using a human KHK-A plasmid or a human KHK-C plasmid. The mice were treated in groups of 5 with the GaINAc-KHK constructs in Table 4 (with the Low-2′-Fluoro modification pattern). Livers were collected and mRNA measured using primer pairs recognizing KHK-All, KHK-C, or KHK-A. The results confirmed that GalNAc-KHK constructs designed to target all KHK transcripts demonstrate successful knockdown in both the human KHK-A and KHK-C HDI mouse models (FIG. 3).

TABLE 4
GalNAc-KHK Constructs Evaluated In
KHK-C and KHK-A HDI Mouse Models

| | Sense | Anti-sense | Sense | Anti-sense |
|---|---|---|---|---|
| | Strand | Strand | Strand | Strand |
| | Unmodified | Unmodified | Modified | Modified |
| Name | SEQ ID NO | SEQ ID NO | SEQ ID NO | SEQ ID NO |
| KHK-516 | 39 | 423 | 775 | 820 |
| KHK-865 | 102 | 486 | 779 | 824 |
| KHK-882 | 104 | 488 | 780 | 825 |
| KHK-885 | 107 | 491 | 782 | 827 |
| KHK-1078 | 191 | 575 | 785 | 830 |
| KHK-1334 | 269 | 653 | 804 | 849 |

### Example 4: Changes in Modification Pattern of KHK-Targeting RNAi Oligonucleotides Maintains mRNA Inhibition Efficacy

[0839] To assess whether modification patterns may impact the targeting efficiency and stability of GalNAc-KHK constructs, two unique patterns were analyzed in HDI mice. Specifically, the modification patterns used were the Low-2′-fluoro pattern described in Example 3 (see FIG. 2A and FIG. 2B) and a Med-2′-fluoro pattern (see FIG. 4A).

Med-2′-Fluoro Modification Pattern for GalNAc-
KHK Constructs
Sense Strand:
5′-mX-S-mX-fX-mX-mX-mX-mX-fX-fX-fX-mX-fX-fX-
mX-mX-mX-fX-mX-mX-mX-mX-mX-mX-mX-mX-mX-mX-
[ademA-GalNAc]- [ademA-GalNAc]- [ademA-
GalNAc]-mX-mX-mX-mX-mX-mX-3′.
Hybridized to:
Antisense Strand:
5′-[MePhosphonate-4O-mX]-S-fX-S-fX-S-fX-fX-
mX-fX-fX-mX-fX-mX-mX-mX-fX-mX-fX-mX-mX-fX-
mX-S-mX-S-mX-3′
(Modification key: Table 3).
Or, represented as:
Sense Strand:
[mXs][mX][fX][mX][mX][mX][mX][fX][fX][fX]
[mX][fX][fX][mX][mX][mX][fX][mX][mX][mX]
[mX][mX][mX][mX][mX][mX][mX][ademA-GalNAc]
[ademA-GalNAc][ademA-GalNAc][mX][mX][mX]
[mX][mX][mX]
Hybridized to:
Antisense Strand:
[MePhosphonate-4O-mXs][fXs][fXs][fX][fX]
[mX][fX][fX][mX][fX][mX][mX][mX][fX][mX]
[fX][mX][mX][fX][mXs][mXs][mX]
(Modification key: Table 3).

[0840] HDI mice were generated as described in Example 3. Mice were treated with Low-2′-Fluoro or Med-2′-Fluoro modified KHK constructs (Table 5). 72 hours after treatment, mice were hydrodynamically injected with [pcDNA3.1-KHK-C, encoding the full human KHK gene (NM_006488)]. Livers were collected and processed as described in Example 3. A group of GalNAc-KHK constructs (KHK-0861,-0865,-0882,-0883,-0885) were mixed together and used as a positive control for inhibition. Both modification patterns resulted in inhibition of KHK mRNA in mice (FIG. 4B-4E). These results demonstrate that both modification patterns provided knockdown of the target mRNA.

TABLE 5
GalNAc-KHK Constructs for Modification Pattern Assay

| | | Sense | Anti-sense | Sense | Anti-sense |
|---|---|---|---|---|---|
| | | Strand | Strand | Strand | Strand |
| | Modifi- | Unmodi- | Unmodi- | Modified | Modified |
| | cation | fied SEQ | fied SEQ | SEQ | SEQ |
| Name | pattern | ID NO | ID NO | ID NO | ID NO |
| KHK-861 | Low-2′F | 100 | 484 | 778 | 823 |
| KHK-861 | Med-2′F | 100 | 484 | 808 | 853 |
| KHK-865 | Low-2′F | 102 | 486 | 779 | 824 |
| KHK-865 | Med-2′F | 102 | 486 | 809 | 854 |
| KHK-882 | Low-2′F | 104 | 488 | 780 | 820 |
| KHK-882 | Med-2′F | 104 | 488 | 810 | 855 |
| KHK-883 | Low-2′F | 105 | 489 | 781 | 826 |
| KHK-883 | Med-2′F | 105 | 489 | 811 | 856 |
| KHK-885 | Low-2′F | 107 | 491 | 782 | 827 |
| KHK-885 | Med-2′F | 107 | 491 | 812 | 857 |
| KHK-1288 | Low-2′F | 250 | 634 | 787 | 832 |
| KHK-1288 | Med-2′F | 250 | 634 | 816 | 861 |
| KHK-1290 | Low-2′F | 252 | 636 | 788 | 833 |
| KHK-1290 | Med-2′F | 252 | 636 | 817 | 862 |
| KHK-1334 | Low-2′F | 269 | 653 | 804 | 849 |
| KHK-1334 | Med-2′F | 269 | 653 | 818 | 863 |
| KHK-516 | Med-2′F | 39 | 423 | 805 | 850 |
| KHK-804 | Med-2′F | N/A | N/A | 806 | 851 |
| KHK-829 | Med-2′F | 92 | 476 | 807 | 852 |
| KHK-1076 | Med-2′F | 189 | 573 | 814 | 859 |
| KHK-1078 | Med-2′F | 191 | 575 | 815 | 860 |

### Example 5: RNAi Oligonucleotide Inhibition of KHK Expression In Vivo

### Mouse HDI KHK Knockdown Screening Studies

[0841] The GalNAc-conjugated KHK oligonucleotides listed in Table 6 were evaluated in 5 HDI mice as described in Example 3. GalNAc-KHK construct treatment effectively reduced KHK-All mRNA (FIG. 5). When using primers specific for the KHK-C isoform, the GalNAc-KHK constructs were still effective at reducing mRNA (FIG. 5).

TABLE 6
GalNAc-KHK Constructs Assayed in HDI Model

| | Sense Strand | Antisense Strand |
|---|---|---|
| Name | Modified SEQ ID NO | Modified SEQ ID NO |
| KHK-885 | 782 | 827 |
| KHK-869 | 795 | 840 |
| KHK-873 | 796 | 841 |
| KHK-879 | 797 | 842 |
| KHK-881 | 798 | 843 |
| KHK-896 | 799 | 844 |
| KHK-1064 | 800 | 845 |
| KHK-1075 | 784 | 829 |
| KHK-1077 | 801 | 846 |
| KHK-1080 | 802 | 847 |
| KHK-1106 | 803 | 848 |
| KHK-1147 | 794 | 839 |
| KHK-1148 | 789 | 834 |
| KHK-1152 | 790 | 835 |
| KHK-1154 | 791 | 836 |
| KHK-1155 | 792 | 837 |
| KHK-1277 | 793 | 838 |

[0842] Additional constructs (Table 7) were assayed using the same methods and found effective knock-down for KHK-All and KHK-C(FIGS. 6A and 6B). Similarly, endogenous mouse KHK was reduced by GalNAc-KHK constructs which align with mouse KHK mRNA (FIG. 6C). Overall, both HDI studies identified GalNAc-KHK constructs effective at reducing KHK mRNA in vivo.

TABLE 7
GalNAc-KHK Constructs Assayed in HDI Model

| | Sense Strand | Antisense Strand |
|---|---|---|
| Name | Modified SEQ ID NO | Modified SEQ ID NO |
| KHK-1054 | 783 | 828 |
| KHK-510 | 774 | 819 |
| KHK-516 | 775 | 820 |
| KHK-829 | 776 | 821 |
| KHK-860 | 777 | 822 |
| KHK-861 | 778 | 823 |
| KHK-865 | 779 | 824 |
| KHK-882 | 780 | 825 |
| KHK-883 | 781 | 826 |
| KHK-885 | 782 | 827 |
| KHK-1075 | 784 | 829 |
| KHK-1078 | 785 | 830 |
| KHK-1281 | 786 | 831 |
| KHK-1288 | 787 | 832 |
| KHK-1290 | 788 | 833 |
| KHK-1334 | 804 | 849 |

### Example 6: RNAi Oligonucleotide Inhibition of KHK Expression and Studies in Non-human Primates

### Single-dose Non-Human Primate (NHP) Studies

[0843] Effective GalNAc-KHK constructs identified in the HDI mouse studies were assayed for targeting efficiency in non-human primates. Specifically, GalNAc-conjugated KHK oligonucleotides listed in Table 8 were evaluated in non-naïve cynomolgus monkeys (Macaca fascicularis). In this study, the monkeys were grouped so that their mean body weights (about 5.4 kg) were comparable between the control and experimental groups. Each cohort contained at least two female and at least two male subjects. The GalNAc-conjugated KHK oligonucleotides were administered subcutaneously at a dose of 6 mg/kg on Study Day 0. Blood samples were collected one week prior to dosing (Day −7), on the dosing date (Day 0) and days 28, 56 and 84 after dosing. Ultrasound-guided core needle liver biopsies were collected on Study Days-7, 28, 56 and 84. At each time point, total RNA derived from the liver biopsy samples was subjected to qRT-PCR analysis to measure KHK mRNA in oligonucleotide-treated monkeys relative to those treated with a comparable volume of PBS. To normalize the data, the measurements were made relative to the geometric mean of two reference genes, PPIB and 18S rRNA. The following TaqMan qPCR probes purchased from Life Technologies, Inc, were used to evaluate gene expressions: Forward-TGCCTTCATGGGCTCAATG (SEQ ID NO: 772); Reverse-TCGGCCACCAGGAAGTCA (SEQ ID NO: 773); Fam probe-CCCTGGCCATGTTG (SEQ ID NO:864)). As shown in FIG. 7A (Day 28), treating NHPs with the GalNAc-conjugated KHK oligonucleotides listed in Table 8 inhibited KHK expression in the liver, as determined by a reduced amount of KHK mRNA in liver samples from oligonucleotide-treated NHPs relative to NHPs treated with PBS. The mean percent reduction of KHK mRNA in the liver samples of treated NHPs is indicated above the set of data points for each treatment group. Days 56 and 84 were also measured (FIGS. 7B and 7C) and a plot of the mean values over each time point is shown in FIG. 7D. For all time points evaluated, almost all the tested GalNAc-conjugated KHK oligonucleotides significantly inhibited KHK mRNA expression. In the same samples, KHK protein levels were detected using rabbit anti-Ketohexokinase (Abcam, AB197593) and anti-rabbit Detection Module for Sally Sue (Protein Simple, cat #DM-001). As shown in FIGS. 8A-8C, at the 28-day timepoint, GalNAc-KHK constructs inhibit KHK protein expression, as normalized to the vinculin control and slowly increases by Day 86. These results demonstrate that treating NHPs with the GalNAc-conjugated KHK oligonucleotides reduces the amount of KHK mRNA in the liver and concomitantly reduces the amount of KHK protein in the liver. However, this correlation is reduced over time after the initial dose (FIGS. 9A-9C).

[0844] Taken together, these results show that GalNAc-conjugated KHK oligonucleotides designed to target human total KHK mRNA inhibit total KHK expression in vivo (as determined by the reduction of the amount of KHK mRNA and protein).

TABLE 8
Single-dose GalNAc-KHK Constructs for NHP Study

| Name | Sense strand SEQ ID NO | Anti-sense strand SEQ ID NO |
|---|---|---|
| KHK-516 | 775 | 820 |
| KHK-865 | 779 | 824 |
| KHK-882 | 780 | 825 |
| KHK-885 | 782 | 827 |
| KHK-1078 | 785 | 830 |
| KHK-1334 | 804 | 849 |

SEQUENCE LISTING

| | Descrip- | | | |
|---|---|---|---|---|
| | tion | | | |
| | Species | | | |
| | (Hs-Mf- | | | SEQ |
| | Ms-Rn | | | ID |
| Name | (rat)) | Strand | Sequence | NO |
| Human | Human | N/A | AGGCAGGGCTGCAGATGCGAGGCCCAGC | 1 |
| (Hs) KHK | (Hs) | | TGTACCTCGCGTGTCCCGGGTCGGGAGTC | |
| nucleotide | | | GGAGACGCAGGTGCAGGAGAGTGCGGGG | |
| sequence | | | CAAGTAGCGCATTTTCTCTTTGCATTCTCG | |
| NM_00648 | | | AGATCGCTTAGCCGCGCTTTAAAAAGGTTT | |
| 8.3 | | | GCATCAGCTGTGAGTCCATCTGACAAGCG | |
| | | | AGGAAACTAAGGCTGAGAAGTGGGAGGC | |
| | | | GTTGCCATCTGCAGGCCCAGGCAACCTGC | |
| | | | TACGGGAAGACCGGGGACCAAGACCTCT | |
| | | | GGGTTGGCTTTCCTAGACCCGCTCGGGTC | |
| | | | TTCGGGTGTCGCGAGGAAGGGCCCTGCT | |
| | | | CCTTTCGTTCCCTGCACCCCTGGCCGCTG | |
| | | | CAGGTGGCTCCCTGGAGGAGGAGCTCCC | |
| | | | ACGCGGAGGAGGAGCCAGGGCAGCTGGG | |
| | | | AGCGGGGACACCATCCTCCTGGATAAGAG | |
| | | | GCAGAGGCCGGGAGGAACCCCGTCAGCC | |
| | | | GGGCGGGCAGGAAGCTCTGGGAGTAGCC | |
| | | | TCATGGAAGAGAAGCAGATCCTGTGCGTG | |
| | | | GGGCTAGTGGTGCTGGACGTCATCAGCCT | |
| | | | GGTGGACAAGTACCCTAAGGAGGACTCGG | |
| | | | AGATAAGGTGTTTGTCCCAGAGATGGCAG | |
| | | | CGCGGAGGCAACGCGTCCAACTCCTGCA | |
| | | | CCGTTCTCTCCCTGCTCGGAGCCCCCTGT | |
| | | | GCCTTCATGGGCTCAATGGCTCCTGGCCA | |
| | | | TGTTGCTGACTTCCTGGTGGCCGACTTCA | |
| | | | GGCGGCGGGGCGTGGACGTGTCTCAGGT | |
| | | | GGCCTGGCAGAGCAAGGGGGACACCCCC | |
| | | | AGCTCCTGCTGCATCATCAACAACTCCAAT | |
| | | | GGCAACCGTACCATTGTGCTCCATGACAC | |
| | | | GAGCCTGCCAGATGTGTCTGCTACAGACT | |
| | | | TTGAGAAGGTTGATCTGACCCAGTTCAAGT | |
| | | | GGATCCACATTGAGGGCCGGAACGCATCG | |
| | | | GAGCAGGTGAAGATGCTGCAGCGGATAGA | |
| | | | CGCACACAACACCAGGCAGCCTCCAGAGC | |
| | | | AGAAGATCCGGGTGTCCGTGGAGGTGGA | |
| | | | GAAGCCACGAGAGGAGCTCTTCCAGCTGT | |
| | | | TTGGCTACGGAGACGTGGTGTTTGTCAGC | |
| | | | AAAGATGTGGCCAAGCACTTGGGGTTCCA | |
| | | | GTCAGCAGAGGAAGCCTTGAGGGGCTTGT | |
| | | | ATGGTCGTGTGAGGAAAGGGGCTGTGCTT | |
| | | | GTCTGTGCCTGGGCTGAGGAGGGCGCCG | |
| | | | ACGCCCTGGGCCCTGATGGCAAATTGCTC | |
| | | | CACTCGGATGCTTTCCCGCCACCCCGCGT | |
| | | | GGTGGATACACTGGGAGCTGGAGACACCT | |
| | | | TCAATGCCTCCGTCATCTTCAGCCTCTCCC | |
| | | | AGGGGAGGAGCGTGCAGGAAGCACTGAG | |
| | | | ATTCGGGTGCCAGGTGGCCGGCAAGAAG | |
| | | | TGTGGCCTGCAGGGCTTTGATGGCATCGT | |
| | | | GTGAGAGCAGGTGCCGGCTCCTCACACAC | |
| | | | CATGGAGACTACCATTGCGGCTGCATCGC | |
| | | | CTTCTCCCCTCCATCCAGCCTGGCGTCCA | |
| | | | GGTTGCCCTGTTCAGGGGACAGATGCAAG | |
| | | | CTGTGGGGAGGACTCTGCCTGTGTCCTGT | |
| | | | GTTCCCCACAGGGAGAGGCTCTGGGGGG | |
| | | | ATGGCTGGGGGATGCAGAGCCTCAGAGC | |
| | | | AAATAAATCTTCCTCAGAGCCAGCTTCTCC | |
| | | | TCTCAATGTCTGAACTGCTCTGGCTGGGC | |
| | | | ATTCCTGAGGCTCTGACTCTTCGATCCTCC | |
| | | | CTCTTTGTGTCCATTCCCCAAATTAACCTC | |
| | | | TCCGCCCAGGCCCAGAGGAGGGGCTGCC | |
| | | | TGGGCTAGAGCAGCGAGAAGTGCCCTGG | |
| | | | GCTTGCCACCAGCTCTGCCCTGGCTGGG | |
| | | | GAGGACACTCGGTGCCCCACACCCAGTGA | |
| | | | ACCTGCCAAAGAAACCGTGAGAGCTCTTC | |
| | | | GGGGCCCTGCGTTGTGCAGACTCTATTCC | |
| | | | CACAGCTCAGAAGCTGGGAGTCCACACCG | |
| | | | CTGAGCTGAACTGACAGGCCAGTGGGGG | |
| | | | GCAGGGGTGCGCCTCCTCTGCCCTGCCC | |
| | | | ACCAGCCTGTGATTTGATGGGGTCTTCATT | |
| | | | GTCCAGAAATACCTCCTCCCGCTGACTGC | |
| | | | CCCAGAGCCTGAAAGTCTCACCCTTGGAG | |
| | | | CCCACCTTGGAATTAAGGGCGTGCCTCAG | |
| | | | CCACAAATGTGACCCAGGATACAGAGTGT | |
| | | | TGCTGTCCTCAGGGAGGTCCGATCTGGAA | |
| | | | CACATATTGGAATTGGGGCCAACTCCAATA | |
| | | | TAGGGTGGGTAAGGCCTTATAATGTAAAG | |
| | | | AGCATATAATGTAAAGGGCTTTAGAGTGAG | |
| | | | ACAGACCTGGATTAAAATCTGCCATTTAAT | |
| | | | TAGCTGCATATCACCTTAGGGTACAGCACT | |
| | | | TAACGCAATCTGCCTCAATTTCTTCATCTG | |
| | | | TCAAATGGAACCAATTCTGCTTGGCTACAG | |
| | | | AATTATTGTGAGGATAAAATCATATATAAAA | |
| | | | TGCCCAGCATGATGCCTGATGTGTA | |
| Cyno- | Cyno- | N/A | GGGGCCGGGCAGCCGCGACCACGGTCTT | 2 |
| molgus | molgus | | CAGGCAGGGCTGCAGATGCAGGCCCAGC | |
| monkey | monkey | | TCTACCTCGCGGGTCCAGGGTCGGGAGT | |
| (Mf) | (Mf) | | CCGAGACGCAGGTGCAGCAGAGGGCGGG | |
| KHK | | | GCACGTAGCGCATTTCCAGCGCATTTTCT | |
| nucleotide | | | CTTTGCATTCTCGAGATCGCTTAGCCGCG | |
| sequence | | | CTTTAGAAGGGTTTGCATCAGCTCCGAGT | |
| XM_00557 | | | CCATCTGACAAGCGAGGAAACTGAGGCTG | |
| 6322.2 | | | AGAAGTGGGAGGCGTTGCCATCTGCAGG | |
| | | | CCCAGGCAACCTGCTACGGGAAGACCGG | |
| | | | GGGCCAAGACCTCCGGGTTGGCTTTCCCA | |
| | | | GGCCAGCTTGGGTCTTCGGGTGTCGGGA | |
| | | | GCAAAGGCCCAGCTCCTTTCGTTTCCTGC | |
| | | | ACCCCTCGCCGCTGCAGGTGGCTCCCCG | |
| | | | GAGGAGGAGCTCCCACGCGGAGGAGGAG | |
| | | | CCAGGGCAGCTGGGAGCGAGGACACCAT | |
| | | | CCTCCTGGATAACAGGCAGAGGCCGGGA | |
| | | | GGAACCCGTCAGTCGGGCGGGCAGGAAG | |
| | | | CTCTGGGATCAGCCTCATGGAAGAGAAGC | |
| | | | AGATCCTGTGCGTGGGGCTAGTGGTGCTG | |
| | | | GACGTCATCAGCCTGGTGGACAAGTACCC | |
| | | | TAAGGAGGACTCAGAGATAAGGTGCTTGT | |
| | | | CCCAGAGATGGCAACGCGGAGGCAACGC | |
| | | | GTCCAACTCCTGCACCGTTCTCTCCCTGC | |
| | | | TCGGAGCCCCCTGTGCCTTCATGGGCTCA | |
| | | | ATGGCCCCTGGCCATGTTGCTGACTTCCT | |
| | | | GGTGGCCGACTTCAGGCGGCGGGGTGTG | |
| | | | GACGTGTCTCAGGTGGCCTGGCAGAGCAA | |
| | | | GGGGGACACCCCCAGCTCCTGCTGCATCA | |
| | | | TCAACAACTCCAATGGCAACCGTACCATTG | |
| | | | TGCTCCATGACACGAGCCTGCCAGATGTG | |
| | | | TCTGCTACGGACTTTGAGAAGGTTGATCT | |
| | | | GACCCAGTTCAAGTGGATCCACATTGAGG | |
| | | | GCCGGAATGCATCGGAGCAGGTGAAGAT | |
| | | | GCTGCAGCGGATAGACGCGCACAACACCA | |
| | | | GGCAGCCTCCAGAGCAGAAGATCCGGGT | |
| | | | GTCCGTGGAGGTGGAGAAGCCACAAGAG | |
| | | | GAGCTCTTTCAGCTGTTTGGCTACGGAGA | |
| | | | CGTGGTGTTTGTCAGCAAAGATGTGGCCA | |
| | | | AGCACTTGGGGTTCCAGTCAGCAGGGGAA | |
| | | | GCCCTGAGGGGCTTGTATGGTCGTGTGAG | |
| | | | GAAAGGGGCTGTGCTTGTCTGTGCCTGGG | |
| | | | CTGAGGAGGGCGCCGACGCCCTGGGCCC | |
| | | | TGATGGCAAACTGATCCACTCGGATGCTTT | |
| | | | CCCGCCACCCCGCGTGGTGGATACCCTG | |
| | | | GGGGCTGGAGACACCTTCAATGCCTCCGT | |
| | | | CATCTTCAGCCTCTCCCAGGGGAGGAGCG | |
| | | | TGCAGGAAGCACTGAGATTCGGATGCCAG | |
| | | | GTGGCCGGCAAGAAGTGTGGCCAGCAGG | |
| | | | GCTTTGATGGCATCGTGTCAGAGCCGGTG | |
| | | | CGGTAGGAGGTGCCGGCTCCCCGCACAC | |
| | | | TATGGAGGCTGACATTGCGGCTGCATCGC | |
| | | | CTTCTCCCCTCCATCCAGCCTGGCATCCA | |
| | | | GGTTGCCCTGCTCAGGGGACAGATGCAG | |
| | | | GCTGTGGGGAGGACTCCGCCTGTGTCCT | |
| | | | GTGTTCCCCACACGTCTCTCCCTGCAGAG | |
| | | | CCTCAGAGCGAATAAATCTTCCTCGGAGC | |
| | | | CAGCTTCCCCTGGCAGCTTCTGTCCTCGA | |
| | | | TGTCTGAACTGCTCTGGCTGGGCATTCCT | |
| | | | GAGGCTCTGACTCTCCAGTCCTCCCTCCT | |
| | | | CGTGTGCATTCCCCAAATTAACCTCTCCAC | |
| | | | CCAGGCCCAGAGGAGGGGCTGCCTGGGC | |
| | | | TATAGCAGCAAGAAGTGCCCCAGGCTTGC | |
| | | | CGCCAGCTCTGCCCTGGCTGGGGAGGAC | |
| | | | ACTCAGTGCCCCATACCCAGCGAACCTGC | |
| | | | CAAAGAACCAGAAGCCATGAGAGCTCTTT | |
| | | | GGGGCCCTGCGTTGTGCAGACTCTATTCC | |
| | | | CATAGCTCAGAAGCTGGGAGTCCACACGG | |
| | | | CTGAGCCAAACTGACAGGCCAGTGGGGG | |
| | | | GCGAGGGGGTGGGGCGCCTCCTCTGCCC | |
| | | | TGCCCACCAGCCTGTGATTTGGTGGCGTC | |
| | | | TTTGTTGTCCAAAAATATCTCCTCCCGCTG | |
| | | | ACTGCCCCAGAGCCTGAAAGTCTCACCCG | |
| | | | TGGAGCCCACCTTGGAATTAAGGGGATGC | |
| | | | CTCAGCCACAAATGTGACCCAAGATAGAG | |
| | | | TGTTGTCCTCAGGGAGGTCGGATCTGGAA | |
| | | | CACATATTGGAATTGGGGCCAACTCCAATA | |
| | | | TAGAGTGGATAAGGCCTTATAATGTAAAGA | |
| | | | GCACATAAGGTAAAGGGCTTTAGAGTCAG | |
| | | | ACAGACCTAGATTCAAATCTGCCATTTAAT | |
| | | | TAGCTGCATGTCACCTGAGGGTACAGCGC | |
| | | | TTAACACAATCCGCCTCAATTTCTTCATCT | |
| | | | GTCAAATGGAGCCAATTCTGCCTGGCTAC | |
| | | | AGAATTATTGCGAGGATAAAATCATGTA | |
| Mouse | Mouse | N/A | GAGGGAGAGAACGCTTGCTTCTGTGCTCC | 3 |
| (Mm) KHK | (Mm) | | GCCTGCGAAGGCGAAGTTTCTGTTGCCAG | |
| nucleotide | | | ACTGTGCTAGTCCGGGTGGTCCAGGGTCT | |
| sequence | | | GCAGCAGGCGCAGAGGGATCGGAAAGGC | |
| NM_00843 | | | GATGCATTACTAGTGCGCTTTCGCTTTGAC | |
| 9.4 | | | AGCTGAGGCGGAAAAGTGAGAGGGCCTG | |
| | | | CCATTGGCCGGGCTAGGTAACCCACCCTT | |
| | | | GCAAAGCAGAAAGCTCCCTGCGGGAGGA | |
| | | | GTTCTGCACGCAGAGGAGGAGCCAAGGTA | |
| | | | GCCAGTGAGAAGTTGGGACACGGTCCTCC | |
| | | | AGTAGATAAGAGGCAGAGCCCAGCAGGAA | |
| | | | CCCCCTCTGCTTGCGGGTAGGAAGCTTGG | |
| | | | GGAGCAGCCTCATGGAAGAGAAGCAGATC | |
| | | | CTGTGCGTGGGGCTGGTGGTGCTGGACA | |
| | | | TCATCAATGTGGTGGACAAATACCCAGAG | |
| | | | GAAGACACGGATCGCAGGTGCCTGTCCCA | |
| | | | GAGATGGCAGCGTGGAGGCAACGCATCC | |
| | | | AACTCCTGCACTGTCCTTTCCTTGCTTGGA | |
| | | | GCCCGCTGTGCCTTCATGGGCTCTTTGGC | |
| | | | CCCTGGCCACGTTGCCGACTTCCTGGTGG | |
| | | | CTGACTTCAGGCAGAGGGGCGTGGATGT | |
| | | | GTCTCAAGTGACTTGGCAGAGCCAGGGAG | |
| | | | ATACCCCTTGCTCTTGCTGCATCGTCAACA | |
| | | | ACTCCAATGGCTCCCGTACCATTATACTCT | |
| | | | ACGACACGAACCTGCCAGATGTGTCTGCT | |
| | | | AAGGACTTTGAGAAGGTCGATCTGACCCG | |
| | | | GTTCAAGTGGATCCACATTGAGGGCCGGA | |
| | | | ATGCATCGGAACAGGTGAAGATGCTGCAG | |
| | | | CGGATAGAGGAGCACAATGCCAAGCAGCC | |
| | | | TCTGCCACAGAAGGTCCGGGTGTCGGTG | |
| | | | GAGATAGAGAAGCCCCGTGAGGAGCTCTT | |
| | | | CCAGTTGTTTAGCTATGGTGAGGTGGTGT | |
| | | | TTGTCAGCAAAGATGTGGCCAAGCACCTG | |
| | | | GGGTTCCAGTCAGCAGTGGAGGCCCTGA | |
| | | | GGGGCTTGTACAGTCGAGTGAAGAAAGGG | |
| | | | GCTACGCTTGTCTGTGCCTGGGCTGAGGA | |
| | | | GGGTGCCGATGCCCTGGGCCCCGATGGT | |
| | | | CAGCTGCTCCACTCAGATGCCTTCCCACC | |
| | | | GCCCCGAGTAGTAGACACTCTTGGGGCTG | |
| | | | GAGACACCTTCAATGCCTCTGTCATCTTCA | |
| | | | GCCTCTCGAAGGGAAACAGCATGCAAGAG | |
| | | | GCCCTGAGATTCGGGTGCCAGGTGGCTG | |
| | | | GCAAGAAGTGTGGCTTGCAGGGGTTTGAT | |
| | | | GGCATTGTGTGAGAGGCAAGCGGCACCA | |
| | | | GCTCGATACCTCAGAGGCTGGCACCATGC | |
| | | | CTGCCACTGCCTTCTCTACTTCCTCCAGCT | |
| | | | TAGCATCCAGCTGCCATTCCCCGGCAGGT | |
| | | | GTGGGATGTGGGACAGCCTCTGTCTGTGT | |
| | | | CTGCGTCTCTGTATACCTATCTCCTCTCTG | |
| | | | CAGATACCTGGAGCAAATAAATCTTCCCCT | |
| | | | GAGCCAGC | |
| KHK-115- | Hs-Mf | 25 mer | AGCGCAUUUUCUCUUUGCAUUCUCG | 4 |
| 154 | commons | Sense | | |
| | | Strand | | |
| KHK-116- | Hs-Mf | 25 mer | GCGCAUUUUCUCUUUGCAUUCUCGA | 5 |
| 155 | commons | Sense | | |
| | | Strand | | |
| KHK-117- | Hs-Mf | 25 mer | CGCAUUUUCUCUUUGCAUUCUCGAG | 6 |
| 156 | commons | Sense | | |
| | | Strand | | |
| KHK-118- | Hs-Mf | 25 mer | GCAUUUUCUCUUUGCAUUCUCGAGA | 7 |
| 157 | commons | Sense | | |
| | | Strand | | |
| KHK-119- | Hs-Mf | 25 mer | CAUUUUCUCUUUGCAUUCUCGAGAT | 8 |
| 158 | commons | Sense | | |
| | | Strand | | |
| KHK-120- | Hs-Mf | 25 mer | AUUUUCUCUUUGCAUUCUCGAGATC | 9 |
| 159 | commons | Sense | | |
| | | Strand | | |
| KHK-121- | Hs-Mf | 25 mer | UUUUCUCUUUGCAUUCUCGAGAUCG | 10 |
| 160 | commons | Sense | | |
| | | Strand | | |
| KHK-122- | Hs-Mf | 25 mer | UUUCUCUUUGCAUUCUCGAGAUCGC | 11 |
| 161 | commons | Sense | | |
| | | Strand | | |
| KHK-123- | Hs-Mf | 25 mer | UUCUCUUUGCAUUCUCGAGAUCGCT | 12 |
| 162 | commons | Sense | | |
| | | Strand | | |
| KHK-124- | Hs-Mf | 25 mer | UCUCUUUGCAUUCUCGAGAUCGCTT | 13 |
| 163 | commons | Sense | | |
| | | Strand | | |
| KHK-125- | Hs-Mf | 25 mer | CUCUUUGCAUUCUCGAGAUCGCUTA | 14 |
| 164 | commons | Sense | | |
| | | Strand | | |
| KHK-126- | Hs-Mf | 25 mer | UCUUUGCAUUCUCGAGAUCGCUUAG | 15 |
| 165 | commons | Sense | | |
| | | Strand | | |
| KHK-127- | Hs-Mf | 25 mer | CUUUGCAUUCUCGAGAUCGCUUAGC | 16 |
| 166 | commons | Sense | | |
| | | Strand | | |
| KHK-128- | Hs-Mf | 25 mer | UUUGCAUUCUCGAGAUCGCUUAGCC | 17 |
| 167 | commons | Sense | | |
| | | Strand | | |
| KHK-179 | Hs | 25 mer | GUGAGUCCAUCUGACAAGCGAGGAA | 18 |
| | unique | Sense | | |
| | | Strand | | |
| KHK-181- | Hs-Mf | 25 mer | GAGUCCAUCUGACAAGCGAGGAAAC | 19 |
| 220 | commons | Sense | | |
| | | Strand | | |
| KHK-182- | Hs-Mf | 25 mer | AGUCCAUCUGACAAGCGAGGAAACT | 20 |
| 221 | commons | Sense | | |
| | | Strand | | |
| KHK-183- | Hs-Mf | 25 mer | GUCCAUCUGACAAGCGAGGAAACTA | 21 |
| 222 | commons | Sense | | |
| | | Strand | | |
| KHK-184- | Hs-Mf | 25 mer | UCCAUCUGACAAGCGAGGAAACUAA | 22 |
| 223 | commons | Sense | | |
| | | Strand | | |
| KHK-185- | Hs-Mf | 25 mer | CCAUCUGACAAGCGAGGAAACUAAG | 23 |
| 224 | commons | Sense | | |
| | | Strand | | |
| KHK-186- | Hs-Mf | 25 mer | CAUCUGACAAGCGAGGAAACUAAGG | 24 |
| 225 | commons | Sense | | |
| | | Strand | | |
| KHK-187- | Hs-Mf | 25 mer | AUCUGACAAGCGAGGAAACUAAGGC | 25 |
| 226 | commons | Sense | | |
| | | Strand | | |
| KHK-188- | Hs-Mf | 25 mer | UCUGACAAGCGAGGAAACUAAGGCT | 26 |
| 227 | commons | Sense | | |
| | | Strand | | |
| KHK-431- | Hs-Mf | 25 mer | GGACACCAUCCUCCUGGAUAAGAGG | 27 |
| 470 | commons | Sense | | |
| | | Strand | | |
| KHK-432- | Hs-Mf | 25 mer | GACACCAUCCUCCUGGAUAAGAGGC | 28 |
| 471 | commons | Sense | | |
| | | Strand | | |
| KHK-433- | Hs-Mf | 25 mer | ACACCAUCCUCCUGGAUAAGAGGCA | 29 |
| 472 | commons | Sense | | |
| | | Strand | | |
| KHK-507- | Hs-Mf- | 25 mer | AGCCUCAUGGAAGAGAAGCAGAUCC | 30 |
| 545-376- | Mm-Rn | Sense | | |
| 218 | commons | Strand | | |
| KHK-508- | Hs-Mf- | 25 mer | GCCUCAUGGAAGAGAAGCAGAUCCT | 31 |
| 546-377- | Mm-Rn | Sense | | |
| 219 | commons | Strand | | |
| KHK-509- | Hs-Mf- | 25 mer | CCUCAUGGAAGAGAAGCAGAUCCTG | 32 |
| 547-378- | Mm-Rn | Sense | | |
| 220 | commons | Strand | | |
| KHK-510- | Hs-Mf- | 25 mer | CUCAUGGAAGAGAAGCAGAUCCUGT | 33 |
| 548-379- | Mm-Rn | Sense | | |
| 221 | commons | Strand | | |
| KHK-511- | Hs-Mf- | 25 mer | UCAUGGAAGAGAAGCAGAUCCUGTG | 34 |
| 549-380- | Mm-Rn | Sense | | |
| 222 | commons | Strand | | |
| KHK-512- | Hs-Mf- | 25 mer | CAUGGAAGAGAAGCAGAUCCUGUGC | 35 |
| 550-381- | Mm-Rn | Sense | | |
| 223 | commons | Strand | | |
| KHK-513- | Hs-Mf- | 25 mer | AUGGAAGAGAAGCAGAUCCUGUGCG | 36 |
| 551-382- | Mm-Rn | Sense | | |
| 224 | commons | Strand | | |
| KHK-514- | Hs-Mf- | 25 mer | UGGAAGAGAAGCAGAUCCUGUGCGT | 37 |
| 552-383- | Mm-Rn | Sense | | |
| 225 | commons | Strand | | |
| KHK-515- | Hs-Mf- | 25 mer | GGAAGAGAAGCAGAUCCUGUGCGTG | 38 |
| 553-384- | Mm-Rn | Sense | | |
| 226 | commons | Strand | | |
| KHK-516- | Hs-Mf- | 25 mer | GAAGAGAAGCAGAUCCUGUGCGUGG | 39 |
| 554-385- | Mm-Rn | Sense | | |
| 227 | commons | Strand | | |
| KHK-517- | Hs-Mf- | 25 mer | AAGAGAAGCAGAUCCUGUGCGUGGG | 40 |
| 555-386- | Mm-Rn | Sense | | |
| 228 | commons | Strand | | |
| KHK-518- | Hs-Mf- | 25 mer | AGAGAAGCAGAUCCUGUGCGUGGGG | 41 |
| 556-387- | Mm-Rn | Sense | | |
| 229 | commons | Strand | | |
| KHK-520- | Hs-Mf- | 25 mer | AGAAGCAGAUCCUGUGCGUGGGGCT | 42 |
| 558-389- | Mm-Rn | Sense | | |
| 231 | commons | Strand | | |
| KHK-521- | Hs-Mf- | 25 mer | GAAGCAGAUCCUGUGCGUGGGGCTA | 43 |
| 559-390- | Mm-Rn | Sense | | |
| 232 | commons | Strand | | |
| KHK-522- | Hs-Mf- | 25 mer | AAGCAGAUCCUGUGCGUGGGGCUAG | 44 |
| 560-391- | Mm-Rn | Sense | | |
| 233 | commons | Strand | | |
| KHK-541- | Hs-Mf | 25 mer | GGCUAGUGGUGCUGGACGUCAUCAG | 45 |
| 579 | commons | Sense | | |
| | | Strand | | |
| KHK-544- | Hs-Mf | 25 mer | UAGUGGUGCUGGACGUCAUCAGCCT | 46 |
| 582 | commons | Sense | | |
| | | Strand | | |
| KHK-546- | Hs-Mf | 25 mer | GUGGUGCUGGACGUCAUCAGCCUGG | 47 |
| 584 | commons | Sense | | |
| | | Strand | | |
| KHK-547- | Hs-Mf | 25 mer | UGGUGCUGGACGUCAUCAGCCUGGT | 48 |
| 585 | commons | Sense | | |
| | | Strand | | |
| KHK-548- | Hs-Mf | 25 mer | GGUGCUGGACGUCAUCAGCCUGGTG | 49 |
| 586 | commons | Sense | | |
| | | Strand | | |
| KHK-549- | Hs-Mf | 25 mer | GUGCUGGACGUCAUCAGCCUGGUGG | 50 |
| 587 | commons | Sense | | |
| | | Strand | | |
| KHK-550- | Hs-Mf | 25 mer | UGCUGGACGUCAUCAGCCUGGUGGA | 51 |
| 588 | commons | Sense | | |
| | | Strand | | |
| KHK-551- | Hs-Mf | 25 mer | GCUGGACGUCAUCAGCCUGGUGGAC | 52 |
| 589 | commons | Sense | | |
| | | Strand | | |
| KHK-552- | Hs-Mf | 25 mer | CUGGACGUCAUCAGCCUGGUGGACA | 53 |
| 590 | commons | Sense | | |
| | | Strand | | |
| KHK-553- | Hs-Mf | 25 mer | UGGACGUCAUCAGCCUGGUGGACAA | 54 |
| 591 | commons | Sense | | |
| | | Strand | | |
| KHK-554- | Hs-Mf | 25 mer | GGACGUCAUCAGCCUGGUGGACAAG | 55 |
| 592 | commons | Sense | | |
| | | Strand | | |
| KHK-555- | Hs-Mf | 25 mer | GACGUCAUCAGCCUGGUGGACAAGT | 56 |
| 593 | commons | Sense | | |
| | | Strand | | |
| KHK-556- | Hs-Mf | 25 mer | ACGUCAUCAGCCUGGUGGACAAGTA | 57 |
| 594 | commons | Sense | | |
| | | Strand | | |
| KHK-557- | Hs-Mf | 25 mer | CGUCAUCAGCCUGGUGGACAAGUAC | 58 |
| 595 | commons | Sense | | |
| | | Strand | | |
| KHK-558- | Hs-Mf | 25 mer | GUCAUCAGCCUGGUGGACAAGUACC | 59 |
| 596 | commons | Sense | | |
| | | Strand | | |
| KHK-559- | Hs-Mf | 25 mer | UCAUCAGCCUGGUGGACAAGUACCC | 60 |
| 597 | commons | Sense | | |
| | | Strand | | |
| KHK-560- | Hs-Mf | 25 mer | CAUCAGCCUGGUGGACAAGUACCCT | 61 |
| 598 | commons | Sense | | |
| | | Strand | | |
| KHK-561- | Hs-Mf | 25 mer | AUCAGCCUGGUGGACAAGUACCCTA | 62 |
| 599 | commons | Sense | | |
| | | Strand | | |
| KHK-562- | Hs-Mf | 25 mer | UCAGCCUGGUGGACAAGUACCCUAA | 63 |
| 600 | commons | Sense | | |
| | | Strand | | |
| KHK-563- | Hs-Mf | 25 mer | CAGCCUGGUGGACAAGUACCCUAAG | 64 |
| 601 | commons | Sense | | |
| | | Strand | | |
| KHK-564- | Hs-Mf | 25 mer | AGCCUGGUGGACAAGUACCCUAAGG | 65 |
| 602 | commons | Sense | | |
| | | Strand | | |
| KHK-565- | Hs-Mf | 25 mer | GCCUGGUGGACAAGUACCCUAAGGA | 66 |
| 603 | commons | Sense | | |
| | | Strand | | |
| KHK-566- | Hs-Mf | 25 mer | CCUGGUGGACAAGUACCCUAAGGAG | 67 |
| 604 | commons | Sense | | |
| | | Strand | | |
| KHK-567- | Hs-Mf | 25 mer | CUGGUGGACAAGUACCCUAAGGAGG | 68 |
| 605 | commons | Sense | | |
| | | Strand | | |
| KHK-568- | Hs-Mf | 25 mer | UGGUGGACAAGUACCCUAAGGAGGA | 69 |
| 606 | commons | Sense | | |
| | | Strand | | |
| KHK-569- | Hs-Mf | 25 mer | GGUGGACAAGUACCCUAAGGAGGAC | 70 |
| 607 | commons | Sense | | |
| | | Strand | | |
| KHK-570- | Hs-Mf | 25 mer | GUGGACAAGUACCCUAAGGAGGACT | 71 |
| 608 | commons | Sense | | |
| | | Strand | | |
| KHK-571- | Hs-Mf | 25 mer | UGGACAAGUACCCUAAGGAGGACTC | 72 |
| 609 | commons | Sense | | |
| | | Strand | | |
| KHK-572- | Hs-Mf | 25 mer | GGACAAGUACCCUAAGGAGGACUCG | 73 |
| 610 | commons | Sense | | |
| | | Strand | | |
| KHK-573- | Hs-Mf | 25 mer | GACAAGUACCCUAAGGAGGACUCGG | 74 |
| 611 | commons | Sense | | |
| | | Strand | | |
| KHK-574- | Hs-Mf | 25 mer | ACAAGUACCCUAAGGAGGACUCGGA | 75 |
| 612 | commons | Sense | | |
| | | Strand | | |
| KHK-575- | Hs-Mf | 25 mer | CAAGUACCCUAAGGAGGACUCGGAG | 76 |
| 613 | commons | Sense | | |
| | | Strand | | |
| KHK-576- | Hs-Mf | 25 mer | AAGUACCCUAAGGAGGACUCGGAGA | 77 |
| 614 | commons | Sense | | |
| | | Strand | | |
| KHK-577- | Hs-Mf | 25 mer | AGUACCCUAAGGAGGACUCGGAGAT | 78 |
| 615 | commons | Sense | | |
| | | Strand | | |
| KHK-638- | Hs-Mf | 25 mer | CGCGUCCAACUCCUGCACCGUUCTC | 79 |
| 676 | commons | Sense | | |
| | | Strand | | |
| KHK-641- | Hs-Mf | 25 mer | GUCCAACUCCUGCACCGUUCUCUCC | 80 |
| 679 | commons | Sense | | |
| | | Strand | | |
| KHK-642- | Hs-Mf | 25 mer | UCCAACUCCUGCACCGUUCUCUCCC | 81 |
| 680 | commons | Sense | | |
| | | Strand | | |
| KHK-643- | Hs-Mf | 25 mer | CCAACUCCUGCACCGUUCUCUCCCT | 82 |
| 681 | commons | Sense | | |
| | | Strand | | |
| KHK-644- | Hs-Mf | 25 mer | CAACUCCUGCACCGUUCUCUCCCTG | 83 |
| 682 | commons | Sense | | |
| | | Strand | | |
| KHK-645- | Hs-Mf | 25 mer | AACUCCUGCACCGUUCUCUCCCUGC | 84 |
| 683 | commons | Sense | | |
| | | Strand | | |
| KHK-646- | Hs-Mf | 25 mer | ACUCCUGCACCGUUCUCUCCCUGCT | 85 |
| 684 | commons | Sense | | |
| | | Strand | | |
| KHK-647- | Hs-Mf | 25 mer | CUCCUGCACCGUUCUCUCCCUGCTC | 86 |
| 685 | commons | Sense | | |
| | | Strand | | |
| KHK-650- | Hs-Mf | 25 mer | CUGCACCGUUCUCUCCCUGCUCGGA | 87 |
| 688 | commons | Sense | | |
| | | Strand | | |
| KHK-676- | Hs-Mf | 25 mer | CCCCCUGUGCCUUCAUGGGCUCAAT | 88 |
| 714 | commons | Sense | | |
| | | Strand | | |
| KHK-713- | Hs-Mf | 25 mer | UGUUGCUGACUUCCUGGUGGCCGAC | 89 |
| 722 | commons | Sense | | |
| | | Strand | | |
| KHK-826- | Hs-Mf | 25 mer | AUGGCAACCGUACCAUUGUGCUCCA | 90 |
| 835 | commons | Sense | | |
| | | Strand | | |
| KHK-827- | Hs-Mf | 25 mer | UGGCAACCGUACCAUUGUGCUCCAT | 91 |
| 836 | commons | Sense | | |
| | | Strand | | |
| KHK-829- | Hs-Mf | 25 mer | GCAACCGUACCAUUGUGCUCCAUGA | 92 |
| 838 | commons | Sense | | |
| | | Strand | | |
| KHK-830- | Hs-Mf | 25 mer | CAACCGUACCAUUGUGCUCCAUGAC | 93 |
| 839 | commons | Sense | | |
| | | Strand | | |
| KHK-831- | Hs-Mf | 25 mer | AACCGUACCAUUGUGCUCCAUGACA | 94 |
| 840 | commons | Sense | | |
| | | Strand | | |
| KHK-832- | Hs-Mf | 25 mer | ACCGUACCAUUGUGCUCCAUGACAC | 95 |
| 841 | commons | Sense | | |
| | | Strand | | |
| KHK-857- | Hs-Mf | 25 mer | GAGCCUGCCAGAUGUGUCUGCUACA | 96 |
| 895 | commons | Sense | | |
| | | Strand | | |
| KHK-858- | Hs-Mf | 25 mer | AGCCUGCCAGAUGUGUCUGCUACAG | 97 |
| 896 | commons | Sense | | |
| | | Strand | | |
| KHK-859- | Hs-Mf | 25 mer | GCCUGCCAGAUGUGUCUGCUACAGA | 98 |
| 897 | commons | Sense | | |
| | | Strand | | |
| KHK-860- | Hs-Mf- | 25 mer | CCUGCCAGAUGUGUCUGCUACAGAC | 99 |
| 898-729- | Mm-Rn | Sense | | |
| 571 | commons | Strand | | |
| KHK-861- | Hs-Mf- | 25 mer | CUGCCAGAUGUGUCUGCUACAGACT | 100 |
| 899-730- | Mm-Rn | Sense | | |
| 572 | commons | Strand | | |
| KHK-862- | Hs-Mf | 25 mer | UGCCAGAUGUGUCUGCUACAGACTT | 101 |
| 900 | commons | Sense | | |
| | | Strand | | |
| KHK-865 | Hs | 25 mer | CAGAUGUGUCUGCUACAGACUUUGA | 102 |
| | unique | Sense | | |
| | | Strand | | |
| KHK-880 | Hs | 25 mer | CAGACUUUGAGAAGGUUGAUCUGAC | 103 |
| | unique | Sense | | |
| | | Strand | | |
| KHK-882- | Hs-Mf | 25 mer | GACUUUGAGAAGGUUGAUCUGACCC | 104 |
| 920 | commons | Sense | | |
| | | Strand | | |
| KHK-883- | Hs-Mf | 25 mer | ACUUUGAGAAGGUUGAUCUGACCCA | 105 |
| 921 | commons | Sense | | |
| | | Strand | | |
| KHK-884- | Hs-Mf | 25 mer | CUUUGAGAAGGUUGAUCUGACCCAG | 106 |
| 922 | commons | Sense | | |
| | | Strand | | |
| KHK-885- | Hs-Mf | 25 mer | UUUGAGAAGGUUGAUCUGACCCAGT | 107 |
| 923 | commons | Sense | | |
| | | Strand | | |
| KHK-886- | Hs-Mf | 25 mer | UUGAGAAGGUUGAUCUGACCCAGTT | 108 |
| 924 | commons | Sense | | |
| | | Strand | | |
| KHK-887- | Hs-Mf | 25 mer | UGAGAAGGUUGAUCUGACCCAGUTC | 109 |
| 925 | commons | Sense | | |
| | | Strand | | |
| KHK-888- | Hs-Mf | 25 mer | GAGAAGGUUGAUCUGACCCAGUUCA | 110 |
| 926 | commons | Sense | | |
| | | Strand | | |
| KHK-889- | Hs-Mf | 25 mer | AGAAGGUUGAUCUGACCCAGUUCAA | 111 |
| 927 | commons | Sense | | |
| | | Strand | | |
| KHK-890- | Hs-Mf | 25 mer | GAAGGUUGAUCUGACCCAGUUCAAG | 112 |
| 928 | commons | Sense | | |
| | | Strand | | |
| KHK-891- | Hs-Mf | 25 mer | AAGGUUGAUCUGACCCAGUUCAAGT | 113 |
| 929 | commons | Sense | | |
| | | Strand | | |
| KHK-892- | Hs-Mf | 25 mer | AGGUUGAUCUGACCCAGUUCAAGTG | 114 |
| 930 | commons | Sense | | |
| | | Strand | | |
| KHK-893- | Hs-Mf | 25 mer | GGUUGAUCUGACCCAGUUCAAGUGG | 115 |
| 931 | commons | Sense | | |
| | | Strand | | |
| KHK-894- | Hs-Mf | 25 mer | GUUGAUCUGACCCAGUUCAAGUGGA | 116 |
| 932 | commons | Sense | | |
| | | Strand | | |
| KHK-895- | Hs-Mf | 25 mer | UUGAUCUGACCCAGUUCAAGUGGAT | 117 |
| 933 | commons | Sense | | |
| | | Strand | | |
| KHK-896- | Hs-Mf | 25 mer | UGAUCUGACCCAGUUCAAGUGGATC | 118 |
| 934 | commons | Sense | | |
| | | Strand | | |
| KHK-897- | Hs-Mf | 25 mer | GAUCUGACCCAGUUCAAGUGGAUCC | 119 |
| 935 | commons | Sense | | |
| | | Strand | | |
| KHK-898- | Hs-Mf | 25 mer | AUCUGACCCAGUUCAAGUGGAUCCA | 120 |
| 936 | commons | Sense | | |
| | | Strand | | |
| KHK-899- | Hs-Mf | 25 mer | UCUGACCCAGUUCAAGUGGAUCCAC | 121 |
| 937 | commons | Sense | | |
| | | Strand | | |
| KHK-900- | Hs-Mf | 25 mer | CUGACCCAGUUCAAGUGGAUCCACA | 122 |
| 938 | commons | Sense | | |
| | | Strand | | |
| KHK-901- | Hs-Mf | 25 mer | UGACCCAGUUCAAGUGGAUCCACAT | 123 |
| 939 | commons | Sense | | |
| | | Strand | | |
| KHK-902- | Hs-Mf | 25 mer | GACCCAGUUCAAGUGGAUCCACATT | 124 |
| 940 | commons | Sense | | |
| | | Strand | | |
| KHK-903- | Hs-Mf | 25 mer | ACCCAGUUCAAGUGGAUCCACAUTG | 125 |
| 941 | commons | Sense | | |
| | | Strand | | |
| KHK-904- | Hs-Mf | 25 mer | CCCAGUUCAAGUGGAUCCACAUUGA | 126 |
| 942 | commons | Sense | | |
| | | Strand | | |
| KHK-905- | Hs-Mf | 25 mer | CCAGUUCAAGUGGAUCCACAUUGAG | 127 |
| 943 | commons | Sense | | |
| | | Strand | | |
| KHK-906- | Hs-Mf | 25 mer | CAGUUCAAGUGGAUCCACAUUGAGG | 128 |
| 944 | commons | Sense | | |
| | | Strand | | |
| KHK-907- | Hs-Mf | 25 mer | AGUUCAAGUGGAUCCACAUUGAGGG | 129 |
| 945 | commons | Sense | | |
| | | Strand | | |
| KHK-908- | Hs-Mf- | 25 mer | GUUCAAGUGGAUCCACAUUGAGGGC | 130 |
| 946-777- | Mm-Rn | Sense | | |
| 619 | commons | Strand | | |
| KHK-909- | Hs-Mf- | 25 mer | UUCAAGUGGAUCCACAUUGAGGGCC | 131 |
| 947-778- | Mm-Rn | Sense | | |
| 620 | commons | Strand | | |
| KHK-910- | Hs-Mf- | 25 mer | UCAAGUGGAUCCACAUUGAGGGCCG | 132 |
| 948-779- | Mm-Rn | Sense | | |
| 621 | commons | Strand | | |
| KHK-911- | Hs-Mf- | 25 mer | CAAGUGGAUCCACAUUGAGGGCCGG | 133 |
| 949-780- | Mm-Rn | Sense | | |
| 622 | commons | Strand | | |
| KHK-912- | Hs-Mf- | 25 mer | AAGUGGAUCCAGAUUGAGGGCCGGA | 134 |
| 950-781- | Mm-Rn | Sense | | |
| 623 | commons | Strand | | |
| KHK-913- | Hs-Mf- | 25 mer | AGUGGAUCCACAUUGAGGGCCGGAA | 135 |
| 951-782- | Mm-Rn | Sense | | |
| 624 | commons | Strand | | |
| KHK-914- | Hs-Mf- | 25 mer | GUGGAUCCACAUUGAGGGCCGGAAC | 136 |
| 952-783- | Mm-Rn | Sense | | |
| 625 | commons | Strand | | |
| KHK-939- | Hs-Mf | 25 mer | GCAUCGGAGCAGGUGAAGAUGCUGC | 137 |
| 977 | commons | Sense | | |
| | | Strand | | |
| KHK-940- | Hs-Mf | 25 mer | CAUCGGAGCAGGUGAAGAUGCUGCA | 138 |
| 978 | commons | Sense | | |
| | | Strand | | |
| KHK-941- | Hs-Mf | 25 mer | AUCGGAGCAGGUGAAGAUGCUGCAG | 139 |
| 979 | commons | Sense | | |
| | | Strand | | |
| KHK-942- | Hs-Mf | 25 mer | UCGGAGCAGGUGAAGAUGCUGCAGC | 140 |
| 980 | commons | Sense | | |
| | | Strand | | |
| KHK-943- | Hs-Mf | 25 mer | CGGAGCAGGUGAAGAUGCUGCAGCG | 141 |
| 981 | commons | Sense | | |
| | | Strand | | |
| KHK-944- | Hs-Mf | 25 mer | GGAGCAGGUGAAGAUGCUGCAGCGG | 142 |
| 982 | commons | Sense | | |
| | | Strand | | |
| KHK-945- | Hs-Mf | 25 mer | GAGCAGGUGAAGAUGCUGCAGCGGA | 143 |
| 983 | commons | Sense | | |
| | | Strand | | |
| KHK-946- | Hs-Mf | 25 mer | AGCAGGUGAAGAUGCUGCAGCGGAT | 144 |
| 984 | commons | Sense | | |
| | | Strand | | |
| KHK-947- | Hs-Mf | 25 mer | GCAGGUGAAGAUGCUGCAGCGGATA | 145 |
| 985 | commons | Sense | | |
| | | Strand | | |
| KHK-948- | Hs-Mf- | 25 mer | CAGGUGAAGAUGCUGCAGCGGAUAG | 146 |
| 986-817 | Mm | Sense | | |
| | commons | Strand | | |
| KHK-949- | Hs-Mf- | 25 mer | AGGUGAAGAUGCUGCAGCGGAUAGA | 147 |
| 987-818 | Mm | Sense | | |
| | commons | Strand | | |
| KHK-950- | Hs-Mf- | 25 mer | GGUGAAGAUGCUGCAGCGGAUAGAC | 148 |
| 988-819 | Mm | Sense | | |
| | commons | Strand | | |
| KHK-951- | Hs-Mf- | 25 mer | GUGAAGAUGCUGCAGCGGAUAGACG | 149 |
| 989-820 | Mm | Sense | | |
| | commons | Strand | | |
| KHK-952- | Hs-Mf- | 25 mer | UGAAGAUGCUGCAGCGGAUAGACGC | 150 |
| 990-821 | Mm | Sense | | |
| | commons | Strand | | |
| KHK-953- | Hs-Mf- | 25 mer | GAAGAUGCUGCAGCGGAUAGACGCA | 151 |
| 991-822 | Mm | Sense | | |
| | commons | Strand | | |
| KHK-954- | Hs-Mf- | 25 mer | AAGAUGCUGCAGCGGAUAGACGCAC | 152 |
| 992-823 | Mm | Sense | | |
| | commons | Strand | | |
| KHK-955- | Hs-Mf- | 25 mer | AGAUGCUGCAGCGGAUAGACGCACA | 153 |
| 993-824 | Mm | Sense | | |
| | commons | Strand | | |
| KHK-956- | Hs-Mf | 25 mer | GAUGCUGCAGCGGAUAGACGCACAC | 154 |
| 994 | commons | Sense | | |
| | | Strand | | |
| KHK-957- | Hs-Mf | 25 mer | AUGCUGCAGCGGAUAGACGCACACA | 155 |
| 995 | commons | Sense | | |
| | | Strand | | |
| KHK-958- | Hs-Mf | 25 mer | UGCUGCAGCGGAUAGACGCACACAA | 156 |
| 996 | commons | Sense | | |
| | | Strand | | |
| KHK-978- | Hs-Mf | 25 mer | CACAACACCAGGCAGCCUCCAGAGC | 157 |
| 1016 | commons | Sense | | |
| | | Strand | | |
| KHK-982- | Hs-Mf | 25 mer | ACACCAGGCAGCCUCCAGAGCAGAA | 158 |
| 1020 | commons | Sense | | |
| | | Strand | | |
| KHK-983- | Hs-Mf | 25 mer | CACCAGGCAGCCUCCAGAGCAGAAG | 159 |
| 1021 | commons | Sense | | |
| | | Strand | | |
| KHK-984- | Hs-Mf | 25 mer | ACCAGGCAGCCUCCAGAGCAGAAGA | 160 |
| 1022 | commons | Sense | | |
| | | Strand | | |
| KHK-985- | Hs-Mf | 25 mer | CCAGGCAGCCUCCAGAGCAGAAGAT | 161 |
| 1023 | commons | Sense | | |
| | | Strand | | |
| KHK-991- | Hs-Mf | 25 mer | AGCCUCCAGAGCAGAAGAUCCGGGT | 162 |
| 1029 | commons | Sense | | |
| | | Strand | | |
| KHK-992- | Hs-Mf | 25 mer | GCCUCCAGAGCAGAAGAUCCGGGTG | 163 |
| 1030 | commons | Sense | | |
| | | Strand | | |
| KHK-993- | Hs-Mf | 25 mer | CCUCCAGAGCAGAAGAUCCGGGUGT | 164 |
| 1031 | commons | Sense | | |
| | | Strand | | |
| KHK-999- | Hs-Mf | 25 mer | GAGCAGAAGAUCCGGGUGUCCGUGG | 165 |
| 1037 | commons | Sense | | |
| | | Strand | | |
| KHK-1000- | Hs-Mf | 25 mer | AGCAGAAGAUCCGGGUGUCCGUGGA | 166 |
| 1038 | commons | Sense | | |
| | | Strand | | |
| KHK-1019- | Hs-Mf | 25 mer | CGUGGAGGUGGAGAAGCCACGAGAG | 167 |
| 1057 | commons | Sense | | |
| | | Strand | | |
| KHK-1054- | Hs-Mf | 25 mer | AGCUGUUUGGCUACGGAGACGUGGT | 168 |
| 1092 | commons | Sense | | |
| | | Strand | | |
| KHK-1055- | Hs-Mf | 25 mer | GCUGUUUGGCUACGGAGACGUGGTG | 169 |
| 1093 | commons | Sense | | |
| | | Strand | | |
| KHK-1057- | Hs-Mf | 25 mer | UGUUUGGCUACGGAGACGUGGUGTT | 170 |
| 1095 | commons | Sense | | |
| | | Strand | | |
| KHK-1058- | Hs-Mf | 25 mer | GUUUGGCUACGGAGACGUGGUGUTT | 171 |
| 1096 | commons | Sense | | |
| | | Strand | | |
| KHK-1059- | Hs-Mf | 25 mer | UUUGGCUACGGAGACGUGGUGUUTG | 172 |
| 1097 | commons | Sense | | |
| | | Strand | | |
| KHK-1060- | Hs-Mf | 25 mer | UUGGCUACGGAGACGUGGUGUUUGT | 173 |
| 1098 | commons | Sense | | |
| | | Strand | | |
| KHK-1061- | Hs-Mf | 25 mer | UGGCUACGGAGACGUGGUGUUUGTC | 174 |
| 1099 | commons | Sense | | |
| | | Strand | | |
| KHK-1062- | Hs-Mf | 25 mer | GGCUACGGAGACGUGGUGUUUGUCA | 175 |
| 1100 | commons | Sense | | |
| | | Strand | | |
| KHK-1063- | Hs-Mf | 25 mer | GCUACGGAGACGUGGUGUUUGUCAG | 176 |
| 1101 | commons | Sense | | |
| | | Strand | | |
| KHK-1064- | Hs-Mf | 25 mer | CUACGGAGACGUGGUGUUUGUCAGC | 177 |
| 1102 | commons | Sense | | |
| | | Strand | | |
| KHK-1065- | Hs-Mf | 25 mer | UACGGAGACGUGGUGUUUGUCAGCA | 178 |
| 1103 | commons | Sense | | |
| | | Strand | | |
| KHK-1066- | Hs-Mf | 25 mer | ACGGAGACGUGGUGUUUGUCAGCAA | 179 |
| 1104 | commons | Sense | | |
| | | Strand | | |
| KHK-1067- | Hs-Mf | 25 mer | CGGAGACGUGGUGUUUGUCAGCAAA | 180 |
| 1105 | commons | Sense | | |
| | | Strand | | |
| KHK-1068- | Hs-Mf | 25 mer | GGAGACGUGGUGUUUGUCAGCAAAG | 181 |
| 1106 | commons | Sense | | |
| | | Strand | | |
| KHK-1069- | Hs-Mf | 25 mer | GAGACGUGGUGUUUGUCAGCAAAGA | 182 |
| 1107 | commons | Sense | | |
| | | Strand | | |
| KHK-1070- | Hs-Mf | 25 mer | AGACGUGGUGUUUGUCAGCAAAGAT | 183 |
| 1108 | commons | Sense | | |
| | | Strand | | |
| KHK-1071- | Hs-Mf | 25 mer | GACGUGGUGUUUGUCAGCAAAGATG | 184 |
| 1109 | commons | Sense | | |
| | | Strand | | |
| KHK-1072- | Hs-Mf | 25 mer | ACGUGGUGUUUGUCAGCAAAGAUGT | 185 |
| 1110 | commons | Sense | | |
| | | Strand | | |
| KHK-1073- | Hs-Mf | 25 mer | CGUGGUGUUUGUCAGCAAAGAUGTG | 186 |
| 1111 | commons | Sense | | |
| | | Strand | | |
| KHK-1074- | Hs-Mf- | 25 mer | GUGGUGUUUGUCAGCAAAGAUGUGG | 187 |
| 1112-943- | Mm-Rn | Sense | | |
| 785 | commons | Strand | | |
| KHK-1075- | Hs-Mf- | 25 mer | UGGUGUUUGUCAGCAAAGAUGUGGC | 188 |
| 1113-944- | Mm-Rn | Sense | | |
| 786 | commons | Strand | | |
| KHK-1076- | Hs-Mf- | 25 mer | GGUGUUUGUCAGCAAAGAUGUGGCC | 189 |
| 1114-945- | Mm-Rn | Sense | | |
| 787 | commons | Strand | | |
| KHK-1077- | Hs-Mf- | 25 mer | GUGUUUGUCAGCAAAGAUGUGGCCA | 190 |
| 1115-946- | Mm-Rn | Sense | | |
| 788 | commons | Strand | | |
| KHK-1078- | Hs-Mf- | 25 mer | UGUUUGUCAGCAAAGAUGUGGCCAA | 191 |
| 1116-947- | Mm-Rn | Sense | | |
| 789 | commons | Strand | | |
| KHK-1079- | Hs-Mf- | 25 mer | GUUUGUCAGCAAAGAUGUGGCCAAG | 192 |
| 1117-948- | Mm-Rn | Sense | | |
| 790 | commons | Strand | | |
| KHK-1080- | Hs-Mf- | 25 mer | UUUGUCAGCAAAGAUGUGGCCAAGC | 193 |
| 11 18-949- | Mm-Rn | Sense | | |
| 791 | commons | Strand | | |
| KHK-1081- | Hs-Mf- | 25 mer | UUGUCAGCAAAGAUGUGGCCAAGCA | 194 |
| 1119-950- | Mm-Rn | Sense | | |
| 792 | commons | Strand | | |
| KHK-1082- | Hs-Mf- | 25 mer | UGUCAGCAAAGAUGUGGCCAAGCAC | 195 |
| 1120-951- | Mm-Rn | Sense | | |
| 793 | commons | Strand | | |
| KHK-1083- | Hs-Mf- | 25 mer | GUCAGCAAAGAUGUGGCCAAGCACT | 196 |
| 1121-952- | Mm-Rn | Sense | | |
| 794 | commons | Strand | | |
| KHK-1084- | Hs-Mf- | 25 mer | UCAGCAAAGAUGUGGCCAAGCACTT | 197 |
| 1122-953- | Mm-Rn | Sense | | |
| 795 | commons | Strand | | |
| KHK-1085- | Hs-Mf- | 25 mer | CAGCAAAGAUGUGGCCAAGCACUTG | 198 |
| 1123-954- | Mm-Rn | Sense | | |
| 796 | commons | Strand | | |
| KHK-1086- | Hs-Mf- | 25 mer | AGCAAAGAUGUGGCCAAGCACUUGG | 199 |
| 1124-955- | Mm-Rn | Sense | | |
| 797 | commons | Strand | | |
| KHK-1087- | Hs-Mf- | 25 mer | GCAAAGAUGUGGCCAAGCACUUGGG | 200 |
| 1125-956- | Mm-Rn | Sense | | |
| 798 | commons | Strand | | |
| KHK-1090- | Hs-Mf | 25 mer | AAGAUGUGGCCAAGCACUUGGGGTT | 201 |
| 1128 | commons | Sense | | |
| | | Strand | | |
| KHK-1091- | Hs-Mf | 25 mer | AGAUGUGGCCAAGCACUUGGGGUTC | 202 |
| 1129 | commons | Sense | | |
| | | Strand | | |
| KHK-1092- | Hs-Mf | 25 mer | GAUGUGGCCAAGCACUUGGGGUUCC | 203 |
| 1130 | commons | Sense | | |
| | | Strand | | |
| KHK-1093- | Hs-Mf | 25 mer | AUGUGGCCAAGCACUUGGGGUUCCA | 204 |
| 1131 | commons | Sense | | |
| | | Strand | | |
| KHK-1095- | Hs-Mf | 25 mer | GUGGCCAAGCACUUGGGGUUCCAGT | 205 |
| 1133 | commons | Sense | | |
| | | Strand | | |
| KHK-1096- | Hs-Mf | 25 mer | UGGCCAAGCACUUGGGGUUCCAGTC | 206 |
| 1134 | commons | Sense | | |
| | | Strand | | |
| KHK-1097- | Hs-Mf | 25 mer | GGCCAAGCACUUGGGGUUCCAGUCA | 207 |
| 1135 | commons | Sense | | |
| | | Strand | | |
| KHK-1099- | Hs-Mf | 25 mer | CCAAGCACUUGGGGUUCCAGUCAGC | 208 |
| 1137 | commons | Sense | | |
| | | Strand | | |
| KHK-1100- | Hs-Mf | 25 mer | CAAGCACUUGGGGUUCCAGUCAGCA | 209 |
| 1138 | commons | Sense | | |
| | | Strand | | |
| KHK-1101- | Hs-Mf | 25 mer | AAGCACUUGGGGUUCCAGUCAGCAG | 210 |
| 1139 | commons | Sense | | |
| | | Strand | | |
| KHK-1102- | Hs-Mf | 25 mer | AGCACUUGGGGUUCCAGUCAGCAGA | 211 |
| 1140 | commons | Sense | | |
| | | Strand | | |
| KHK-1103- | Hs-Mf | 25 mer | GCACUUGGGGUUCCAGUCAGCAGAG | 212 |
| 1141 | commons | Sense | | |
| | | Strand | | |
| KHK-1104- | Hs-Mf | 25 mer | CACUUGGGGUUCCAGUCAGCAGAGG | 213 |
| 1142 | commons | Sense | | |
| | | Strand | | |
| KHK-1106- | Hs-Mf | 25 mer | CUUGGGGUUCCAGUCAGCAGAGGAA | 214 |
| 1144 | commons | Sense | | |
| | | Strand | | |
| KHK-1107- | Hs-Mf | 25 mer | UUGGGGUUCCAGUCAGCAGAGGAAG | 215 |
| 1145 | commons | Sense | | |
| | | Strand | | |
| KHK-1135- | Hs-Mf | 25 mer | UGAGGGGCUUGUAUGGUCGUGUGAG | 216 |
| 1173 | commons | Sense | | |
| | | Strand | | |
| KHK-1136- | Hs-Mf | 25 mer | GAGGGGCUUGUAUGGUCGUGUGAGG | 217 |
| ll74 | commons | Sense | | |
| | | Strand | | |
| KHK-1137- | Hs-Mf | 25 mer | AGGGGCUUGUAUGGUCGUGUGAGGA | 218 |
| 1175 | commons | Sense | | |
| | | Strand | | |
| KHK-1138- | Hs-Mf | 25 mer | GGGGCUUGUAUGGUCGUGUGAGGAA | 219 |
| 1176 | commons | Sense | | |
| | | Strand | | |
| KHK-1139- | Hs-Mf | 25 mer | GGGCUUGUAUGGUCGUGUGAGGAAA | 220 |
| 1177 | commons | Sense | | |
| | | Strand | | |
| KHK-1140- | Hs-Mf | 25 mer | GGCUUGUAUGGUCGUGUGAGGAAAG | 221 |
| 1178 | commons | Sense | | |
| | | Strand | | |
| KHK-1141- | Hs-Mf | 25 mer | GCUUGUAUGGUCGUGUGAGGAAAGG | 222 |
| 1179 | commons | Sense | | |
| | | Strand | | |
| KHK-1142- | Hs-Mf | 25 mer | CUUGUAUGGUCGUGUGAGGAAAGGG | 223 |
| 1180 | commons | Sense | | |
| | | Strand | | |
| KHK-1143- | Hs-Mf | 25 mer | UUGUAUGGUCGUGUGAGGAAAGGGG | 224 |
| 1181 | commons | Sense | | |
| | | Strand | | |
| KHK-1144- | Hs-Mf | 25 mer | UGUAUGGUCGUGUGAGGAAAGGGGC | 225 |
| 1182 | commons | Sense | | |
| | | Strand | | |
| KHK-1145- | Hs-Mf | 25 mer | GUAUGGUCGUGUGAGGAAAGGGGCT | 226 |
| 1183 | commons | Sense | | |
| | | Strand | | |
| KHK-1146- | Hs-Mf | 25 mer | UAUGGUCGUGUGAGGAAAGGGGCTG | 227 |
| 1184 | commons | Sense | | |
| | | Strand | | |
| KHK-1147- | Hs-Mf | 25 mer | AUGGUCGUGUGAGGAAAGGGGCUGT | 228 |
| 1185 | commons | Sense | | |
| | | Strand | | |
| KHK-1148- | Hs-Mf | 25 mer | UGGUCGUGUGAGGAAAGGGGCUGTG | 229 |
| 1186 | commons | Sense | | |
| | | Strand | | |
| KHK-1149- | Hs-Mf | 25 mer | GGUCGUGUGAGGAAAGGGGCUGUGC | 230 |
| 1187 | commons | Sense | | |
| | | Strand | | |
| KHK-1153- | Hs-Mf | 25 mer | GUGUGAGGAAAGGGGCUGUGCUUGT | 231 |
| 1191 | commons | Sense | | |
| | | Strand | | |
| KHK-1154- | Hs-Mf | 25 mer | UGUGAGGAAAGGGGCUGUGCUUGTC | 232 |
| 1192 | commons | Sense | | |
| | | Strand | | |
| KHK-1157- | Hs-Mf | 25 mer | GAGGAAAGGGGCUGUGCUUGUCUGT | 233 |
| 1195 | commons | Sense | | |
| | | Strand | | |
| KHK-1158- | Hs-Mf | 25 mer | AGGAAAGGGGCUGUGCUUGUCUGTG | 234 |
| 1196 | commons | Sense | | |
| | | Strand | | |
| KHK-1159- | Hs-Mf | 25 mer | GGAAAGGGGCUGUGCUUGUCUGUGC | 235 |
| 1197 | commons | Sense | | |
| | | Strand | | |
| KHK-1161- | Hs-Mf | 25 mer | AAAGGGGCUGUGCUUGUCUGUGCCT | 236 |
| 1199 | commons | Sense | | |
| | | Strand | | |
| KHK-1163- | Hs-Mf | 25 mer | AGGGGCUGUGCUUGUCUGUGCCUGG | 237 |
| 1201 | commons | Sense | | |
| | | Strand | | |
| KHK-1164- | Hs-Mf | 25 mer | GGGGCUGUGCUUGUCUGUGCCUGGG | 238 |
| 1202 | commons | Sense | | |
| | | Strand | | |
| KHK-1232- | Hs-Mf | 25 mer | CCACUCGGAUGCUUUCCCGCCACCC | 239 |
| 1270 | commons | Sense | | |
| | | Strand | | |
| KHK-1278- | Hs-Mf- | 25 mer | GCUGGAGACACCUUCAAUGCCUCCG | 240 |
| 1316-1147- | Mm-Rn | Sense | | |
| 989 | commons | Strand | | |
| KHK-1279- | Hs-Mf- | 25 mer | CUGGAGACACCUUCAAUGCCUCCGT | 241 |
| 1317-1148- | Mm-Rn | Sense | | |
| 990 | commons | Strand | | |
| KHK-1280- | Hs-Mf- | 25 mer | UGGAGACACCUUCAAUGCCUCCGTC | 242 |
| 1318-1149- | Mm-Rn | Sense | | |
| 991 | commons | Strand | | |
| KHK-1281- | Hs-Mf- | 25 mer | GGAGACACCUUCAAUGCCUCCGUCA | 243 |
| 1319-1150- | Mm-Rn | Sense | | |
| 992 | commons | Strand | | |
| KHK-1282- | Hs-Mf- | 25 mer | GAGACACCUUCAAUGCCUCCGUCAT | 244 |
| 1320-1151- | Mm-Rn | Sense | | |
| 993 | commons | Strand | | |
| KHK-1283- | Hs-Mf | 25 mer | AGACACCUUCAAUGCCUCCGUCATC | 245 |
| 1321 | commons | Sense | | |
| | | Strand | | |
| KHK-1284- | Hs-Mf | 25 mer | GACACCUUCAAUGCCUCCGUCAUCT | 246 |
| 1322 | commons | Sense | | |
| | | Strand | | |
| KHK-1285- | Hs-Mf | 25 mer | ACACCUUCAAUGCCUCCGUCAUCTT | 247 |
| 1323 | commons | Sense | | |
| | | Strand | | |
| KHK-1286- | Hs-Mf | 25 mer | CACCUUCAAUGCCUCCGUCAUCUTC | 248 |
| 1324 | commons | Sense | | |
| | | Strand | | |
| KHK-1287- | Hs-Mf | 25 mer | ACCUUCAAUGCCUCCGUCAUCUUCA | 249 |
| 1325 | commons | Sense | | |
| | | Strand | | |
| KHK-1288- | Hs-Mf | 25 mer | CCUUCAAUGCCUCCGUCAUCUUCAG | 250 |
| 1326 | commons | Sense | | |
| | | Strand | | |
| KHK-1289- | Hs-Mf | 25 mer | CUUCAAUGCCUCCGUCAUCUUCAGC | 251 |
| 1327 | commons | Sense | | |
| | | Strand | | |
| KHK-1290- | Hs-Mf | 25 mer | UUCAAUGCCUCCGUCAUCUUCAGCC | 252 |
| 1328 | commons | Sense | | |
| | | Strand | | |
| KHK-1291- | Hs-Mf | 25 mer | UCAAUGCCUCCGUCAUCUUCAGCCT | 253 |
| 1329 | commons | Sense | | |
| | | Strand | | |
| KHK-1292- | Hs-Mf | 25 mer | CAAUGCCUCCGUCAUCUUCAGCCTC | 254 |
| 1330 | commons | Sense | | |
| | | Strand | | |
| KHK-1293- | Hs-Mf | 25 mer | AAUGCCUCCGUCAUCUUCAGCCUCT | 255 |
| 1331 | commons | Sense | | |
| | | Strand | | |
| KHK-1294- | Hs-Mf | 25 mer | AUGCCUCCGUCAUCUUCAGCCUCTC | 256 |
| 1332 | commons | Sense | | |
| | | Strand | | |
| KHK-1295- | Hs-Mf | 25 mer | UGCCUCCGUCAUCUUCAGCCUCUCC | 257 |
| 1333 | commons | Sense | | |
| | | Strand | | |
| KHK-1297- | Hs-Mf | 25 mer | CCUCCGUCAUCUUCAGCCUCUCCCA | 258 |
| 1335 | commons | Sense | | |
| | | Strand | | |
| KHK-1323- | Hs-Mf | 25 mer | GGGAGGAGCGUGCAGGAAGCACUGA | 259 |
| 1361 | commons | Sense | | |
| | | Strand | | |
| KHK-1325- | Hs-Mf | 25 mer | GAGGAGCGUGCAGGAAGCACUGAGA | 260 |
| 1363 | commons | Sense | | |
| | | Strand | | |
| KHK-1326- | Hs-Mf | 25 mer | AGGAGCGUGCAGGAAGCACUGAGAT | 261 |
| 1364 | commons | Sense | | |
| | | Strand | | |
| KHK-1327- | Hs-Mf | 25 mer | GGAGCGUGCAGGAAGCACUGAGATT | 262 |
| 1365 | commons | Sense | | |
| | | Strand | | |
| KHK-1328- | Hs-Mf | 25 mer | GAGCGUGCAGGAAGCACUGAGAUTC | 263 |
| 1366 | commons | Sense | | |
| | | Strand | | |
| KHK-1329- | Hs-Mf | 25 mer | AGCGUGCAGGAAGCACUGAGAUUCG | 264 |
| 1367 | commons | Sense | | |
| | | Strand | | |
| KHK-1330- | Hs-Mf | 25 mer | GCGUGCAGGAAGCACUGAGAUUCGG | 265 |
| 1368 | commons | Sense | | |
| | | Strand | | |
| KHK-1331- | Hs-Mf | 25 mer | CGUGCAGGAAGCACUGAGAUUCGGG | 266 |
| 1369 | commons | Sense | | |
| | | Strand | | |
| KHK-1332- | Hs-Mf | 25 mer | GUGCAGGAAGCACUGAGAUUCGGGT | 267 |
| 1370 | commons | Sense | | |
| | | Strand | | |
| KHK-1333- | Hs-Mf | 25 mer | UGCAGGAAGCACUGAGAUUCGGGTG | 268 |
| 1371 | commons | Sense | | |
| | | Strand | | |
| KHK-1334- | Hs-Mf | 25 mer | GCAGGAAGCACUGAGAUUCGGGUGC | 269 |
| 1372 | commons | Sense | | |
| | | Strand | | |
| KHK-1335- | Hs-Mf | 25 mer | CAGGAAGCACUGAGAUUCGGGUGCC | 270 |
| 1373 | commons | Sense | | |
| | | Strand | | |
| KHK-1336- | Hs-Mf | 25 mer | AGGAAGCACUGAGAUUCGGGUGCCA | 271 |
| 1374 | commons | Sense | | |
| | | Strand | | |
| KHK-1385- | Hs-Mf | 25 mer | GCAGGGCUUUGAUGGCAUCGUGUGA | 272 |
| 1423 | commons | Sense | | |
| | | Strand | | |
| KHK-1387- | Hs-Mf | 25 mer | AGGGCUUUGAUGGCAUCGUGUGAGA | 273 |
| 1425 | commons | Sense | | |
| | | Strand | | |
| KHK-1388- | Hs-Mf | 25 mer | GGGCUUUGAUGGCAUCGUGUGAGAG | 274 |
| 1426 | commons | Sense | | |
| | | Strand | | |
| KHK-1389- | Hs-Mf | 25 mer | GGCUUUGAUGGCAUCGUGUGAGAGC | 275 |
| 1427 | commons | Sense | | |
| | | Strand | | |
| KHK-1538- | Hs-Mf | 25 mer | GCCUGUGUCCUGUGUUCCCCACAGG | 276 |
| 1588 | commons | Sense | | |
| | | Strand | | |
| KHK-1540- | Hs-Mf | 25 mer | CUGUGUCCUGUGUUCCCCACAGGGA | 277 |
| 1590 | commons | Sense | | |
| | | Strand | | |
| KHK-1542- | Hs-Mf | 25 mer | GUGUCCUGUGUUCCCCACAGGGAGA | 278 |
| 1592 | commons | Sense | | |
| | | Strand | | |
| KHK-1665- | Hs-Mf | 25 mer | CAUUCCUGAGGCUCUGACUCUUCGA | 279 |
| 1708 | commons | Sense | | |
| | | Strand | | |
| KHK-1666- | Hs-Mf | 25 mer | AUUCCUGAGGCUCUGACUCUUCGAT | 280 |
| 1709 | commons | Sense | | |
| | | Strand | | |
| KHK-1667- | Hs-Mf | 25 mer | UUCCUGAGGCUCUGACUCUUCGATC | 281 |
| 1710 | commons | Sense | | |
| | | Strand | | |
| KHK-1707- | Hs-Mf | 25 mer | CAUUCCCCAAAUUAACCUCUCCGCC | 282 |
| 1750 | commons | Sense | | |
| | | Strand | | |
| KHK-1708- | Hs-Mf | 25 mer | AUUCCCCAAAUUAACCUCUCCGCCC | 283 |
| 1751 | commons | Sense | | |
| | | Strand | | |
| KHK-1709- | Hs-Mf | 25 mer | UUCCCCAAAUUAACCUCUCCGCCCA | 284 |
| 1752 | commons | Sense | | |
| | | Strand | | |
| KHK-1869- | Hs-Mf | 25 mer | GGGCCCUGCGUUGUGCAGACUCUAT | 285 |
| 1918 | commons | Sense | | |
| | | Strand | | |
| KHK-1870- | Hs-Mf | 25 mer | GGCCCUGCGUUGUGCAGACUCUATT | 286 |
| 1919 | commons | Sense | | |
| | | Strand | | |
| KHK-1871- | Hs-Mf | 25 mer | GCCCUGCGUUGUGCAGACUCUAUTC | 287 |
| 1920 | commons | Sense | | |
| | | Strand | | |
| KHK-1872- | Hs-Mf | 25 mer | CCCUGCGUUGUGCAGACUCUAUUCC | 288 |
| 1921 | commons | Sense | | |
| | | Strand | | |
| KHK-1873- | Hs-Mf | 25 mer | CCUGCGUUGUGCAGACUCUAUUCCC | 289 |
| 1922 | commons | Sense | | |
| | | Strand | | |
| KHK-1874- | Hs-Mf | 25 mer | CUGCGUUGUGCAGACUCUAUUCCCA | 290 |
| 1923 | commons | Sense | | |
| | | Strand | | |
| KHK-1875- | Hs-Mf | 25 mer | UGCGUUGUGCAGACUCUAUUCCCAC | 291 |
| 1924 | commons | Sense | | |
| | | Strand | | |
| KHK-1876- | Hs-Mf | 25 mer | GCGUUGUGCAGACUCUAUUCCCACA | 292 |
| 1925 | commons | Sense | | |
| | | Strand | | |
| KHK-1877- | Hs-Mf | 25 mer | CGUUGUGCAGACUCUAUUCCCACAG | 293 |
| 1926 | commons | Sense | | |
| | | Strand | | |
| KHK-1878- | Hs-Mf | 25 mer | GUUGUGCAGACUCUAUUCCCACAGC | 294 |
| 1927 | commons | Sense | | |
| | | Strand | | |
| KHK-1879- | Hs-Mf | 25 mer | UUGUGCAGACUCUAUUCCCACAGCT | 295 |
| 1928 | commons | Sense | | |
| | | Strand | | |
| KHK-1880- | Hs-Mf | 25 mer | UGUGCAGACUCUAUUCCCACAGCTC | 296 |
| 1929 | commons | Sense | | |
| | | Strand | | |
| KHK-1900- | Hs-Mf | 25 mer | AGCUCAGAAGCUGGGAGUCCACACC | 297 |
| 1949 | commons | Sense | | |
| | | Strand | | |
| KHK-1905- | Hs-Mf | 25 mer | AGAAGCUGGGAGUCCACACCGCUGA | 298 |
| 1954 | commons | Sense | | |
| | | Strand | | |
| KHK-1971- | Hs-Mf | 25 mer | CUGCCCUGCCCACCAGCCUGUGATT | 299 |
| 2025 | commons | Sense | | |
| | | Strand | | |
| KHK-1974- | Hs-Mf | 25 mer | CCCUGCCCACCAGCCUGUGAUUUGA | 300 |
| 2028 | commons | Sense | | |
| | | Strand | | |
| KHK-1975- | Hs-Mf | 25 mer | CCUGCCCACCAGCCUGUGAUUUGAT | 301 |
| 2029 | commons | Sense | | |
| | | Strand | | |
| KHK-1976- | Hs-Mf | 25 mer | CUGCCCACCAGCCUGUGAUUUGATG | 302 |
| 2030 | commons | Sense | | |
| | | Strand | | |
| KHK-1978- | Hs-Mf | 25 mer | GCCCACCAGCCUGUGAUUUGAUGGG | 303 |
| 2032 | commons | Sense | | |
| | | Strand | | |
| KHK-1979- | Hs-Mf | 25 mer | CCCACCAGCCUGUGAUUUGAUGGGG | 304 |
| 2033 | commons | Sense | | |
| | | Strand | | |
| KHK-2032- | Hs-Mf | 25 mer | GCUGACUGCCCCAGAGCCUGAAAGT | 305 |
| 2086 | commons | Sense | | |
| | | Strand | | |
| KHK-2035- | Hs-Mf | 25 mer | GACUGCCCCAGAGCCUGAAAGUCTC | 306 |
| 2089 | commons | Sense | | |
| | | Strand | | |
| KHK-2036- | Hs-Mf | 25 mer | ACUGCCCCAGAGCCUGAAAGUCUCA | 307 |
| 2090 | commons | Sense | | |
| | | Strand | | |
| KHK-2037- | Hs-Mf | 25 mer | CUGCCCCAGAGCCUGAAAGUCUCAC | 308 |
| 2091 | commons | Sense | | |
| | | Strand | | |
| KHK-2038- | Hs-Mf | 25 mer | UGCCCCAGAGCCUGAAAGUCUCACC | 309 |
| 2092 | commons | Sense | | |
| | | Strand | | |
| KHK-2039- | Hs-Mf | 25 mer | GCCCCAGAGCCUGAAAGUCUCACCC | 310 |
| 2093 | commons | Sense | | |
| | | Strand | | |
| KHK-2040- | Hs-Mf | 25 mer | CCCCAGAGCCUGAAAGUCUCACCCT | 311 |
| 2094 | commons | Sense | | |
| | | Strand | | |
| KHK-2041- | Hs-Mf | 25 mer | CCCAGAGCCUGAAAGUCUCACCCTT | 312 |
| 2095 | commons | Sense | | |
| | | Strand | | |
| KHK-2042- | Hs-Mf | 25 mer | CCAGAGCCUGAAAGUCUCACCCUTG | 313 |
| 2096 | commons | Sense | | |
| | | Strand | | |
| KHK-2043- | Hs-Mf | 25 mer | CAGAGGCUGAAAGUCUCACCCUUGG | 314 |
| 2097 | commons | Sense | | |
| | | Strand | | |
| KHK-2044- | Hs-Mf | 25 mer | AGAGCCUGAAAGUCUCACCCUUGGA | 315 |
| 2098 | commons | Sense | | |
| | | Strand | | |
| KHK-2045- | Hs-Mf | 25 mer | GAGCCUGAAAGUCUCACCCUUGGAG | 316 |
| 2099 | commons | Sense | | |
| | | Strand | | |
| KHK-2067- | Hs-Mf | 25 mer | GAGCCCACCUUGGAAUUAAGGGCGT | 317 |
| 2121 | commons | Sense | | |
| | | Strand | | |
| KHK-2069- | Hs-Mf | 25 mer | GCCCACCUUGGAAUUAAGGGCGUGC | 318 |
| 2123 | commons | Sense | | |
| | | Strand | | |
| KHK-2091- | Hs-Mf | 25 mer | UGCCUCAGCCACAAAUGUGACCCAG | 319 |
| 2145 | commons | Sense | | |
| | | Strand | | |
| KHK-2092- | Hs-Mf | 25 mer | GCCUCAGCCACAAAUGUGACCCAGG | 320 |
| 2146 | commons | Sense | | |
| | | Strand | | |
| KHK-2093- | Hs-Mf | 25 mer | CCUCAGCCACAAAUGUGACCCAGGA | 321 |
| 2147 | commons | Sense | | |
| | | Strand | | |
| KHK-2094- | Hs-Mf | 25 mer | CUCAGCCACAAAUGUGACCCAGGAT | 322 |
| 2148 | commons | Sense | | |
| | | Strand | | |
| KHK-2095- | Hs-Mf | 25 mer | UCAGCCACAAAUGUGACCCAGGATA | 323 |
| 2149 | commons | Sense | | |
| | | Strand | | |
| KHK-2096- | Hs-Mf | 25 mer | CAGCCACAAAUGUGACCCAGGAUAC | 324 |
| 2150 | commons | Sense | | |
| | | Strand | | |
| KHK-2105 | Hs | 25 mer | AUGUGACCCAGGAUACAGAGUGUTG | 325 |
| | unique | Sense | | |
| | | Strand | | |
| KHK-2148- | Hs-Mf | 25 mer | GAUCUGGAACACAUAUUGGAAUUGG | 326 |
| 2197 | commons | Sense | | |
| | | Strand | | |
| KHK-2149- | Hs-Mf | 25 mer | AUCUGGAACACAUAUUGGAAUUGGG | 327 |
| 2198 | commons | Sense | | |
| | | Strand | | |
| KHK-2150- | Hs-Mf | 25 mer | UCUGGAACACAUAUUGGAAUUGGGG | 328 |
| 2199 | commons | Sense | | |
| | | Strand | | |
| KHK-2151- | Hs-Mf | 25 mer | CUGGAACACAUAUUGGAAUUGGGGC | 329 |
| 2200 | commons | Sense | | |
| | | Strand | | |
| KHK-2152- | Hs-Mf | 25 mer | UGGAACACAUAUUGGAAUUGGGGCC | 330 |
| 2201 | commons | Sense | | |
| | | Strand | | |
| KHK-2153- | Hs-Mf | 25 mer | GGAACACAUAUUGGAAUUGGGGCCA | 331 |
| 2202 | commons | Sense | | |
| | | Strand | | |
| KHK-2154- | Hs-Mf | 25 mer | GAACACAUAUUGGAAUUGGGGCCAA | 332 |
| 2203 | commons | Sense | | |
| | | Strand | | |
| KHK-2155- | Hs-Mf | 25 mer | AACACAUAUUGGAAUUGGGGCCAAC | 333 |
| 2204 | commons | Sense | | |
| | | Strand | | |
| KHK-2156- | Hs-Mf | 25 mer | ACACAUAUUGGAAUUGGGGCCAACT | 334 |
| 2205 | commons | Sense | | |
| | | Strand | | |
| KHK-2157- | Hs-Mf | 25 mer | CACAUAUUGGAAUUGGGGCCAACTC | 335 |
| 2206 | commons | Sense | | |
| | | Strand | | |
| KHK-2159- | Hs-Mf | 25 mer | CAUAUUGGAAUUGGGGCCAACUCCA | 336 |
| 2208 | commons | Sense | | |
| | | Strand | | |
| KHK-2160- | Hs-Mf | 25 mer | AUAUUGGAAUUGGGGCCAACUCCAA | 337 |
| 2209 | commons | Sense | | |
| | | Strand | | |
| KHK-2161- | Hs-Mf | 25 mer | UAUUGGAAUUGGGGCCAACUCCAAT | 338 |
| 2210 | commons | Sense | | |
| | | Strand | | |
| KHK-2162- | Hs-Mf | 25 mer | AUUGGAAUUGGGGCCAACUCCAATA | 339 |
| 2211 | commons | Sense | | |
| | | Strand | | |
| KHK-2163- | Hs-Mf | 25 mer | UUGGAAUUGGGGCCAACUCCAAUAT | 340 |
| 2212 | commons | Sense | | |
| | | Strand | | |
| KHK-2164- | Hs-Mf | 25 mer | UGGAAUUGGGGCCAACUCCAAUATA | 341 |
| 2213 | commons | Sense | | |
| | | Strand | | |
| KHK-2165- | Hs-Mf | 25 mer | GGAAUUGGGGCCAACUCCAAUAUAG | 342 |
| 2214 | commons | Sense | | |
| | | Strand | | |
| KHK-2166- | Hs-Mf | 25 mer | GAAUUGGGGCCAACUCCAAUAUAGG | 343 |
| 2215 | commons | Sense | | |
| | | Strand | | |
| KHK-2170- | Hs-Mf | 25 mer | UGGGGCCAACUCCAAUAUAGGGUGG | 344 |
| 2219 | commons | Sense | | |
| | | Strand | | |
| KHK-2196- | Hs-Mf | 25 mer | UAAGGCCUUAUAAUGUAAAGAGCAT | 345 |
| 2245 | commons | Sense | | |
| | | Strand | | |
| KHK-2197- | Hs-Mf | 25 mer | AAGGCCUUAUAAUGUAAAGAGCATA | 346 |
| 2246 | commons | Sense | | |
| | | Strand | | |
| KHK-2198- | Hs-Mf | 25 mer | AGGCCUUAUAAUGUAAAGAGCAUAT | 347 |
| 2247 | commons | Sense | | |
| | | Strand | | |
| KHK-2199- | Hs-Mf | 25 mer | GGCCUUAUAAUGUAAAGAGCAUATA | 348 |
| 2248 | commons | Sense | | |
| | | Strand | | |
| KHK-2200- | Hs-Mf | 25 mer | GCCUUAUAAUGUAAAGAGCAUAUAA | 349 |
| 2249 | commons | Sense | | |
| | | Strand | | |
| KHK-2201- | Hs-Mf | 25 mer | CCUUAUAAUGUAAAGAGCAUAUAAT | 350 |
| 2250 | commons | Sense | | |
| | | Strand | | |
| KHK-2205 | Hs | 25 mer | AUAAUGUAAAGAGCAUAUAAUGUAA | 351 |
| | unique | Sense | | |
| | | Strand | | |
| KHK-2238 | Hs | 25 mer | AGAGUGAGACAGACCUGGAUUAAAA | 352 |
| | unique | Sense | | |
| | | Strand | | |
| KHK-2260- | Hs-Mf | 25 mer | AAAUCUGCCAUUUAAUUAGCUGCAT | 353 |
| 2309 | commons | Sense | | |
| | | Strand | | |
| KHK-2261- | Hs-Mf | 25 mer | AAUCUGCCAUUUAAUUAGCUGCATA | 354 |
| 2310 | commons | Sense | | |
| | | Strand | | |
| KHK-2262- | Hs-Mf | 25 mer | AUCUGCCAUUUAAUUAGCUGCAUAT | 355 |
| 2311 | commons | Sense | | |
| | | Strand | | |
| KHK-2263- | Hs-Mf | 25 mer | UCUGCCAUUUAAUUAGCUGCAUATC | 356 |
| 2312 | commons | Sense | | |
| | | Strand | | |
| KHK-2264- | Hs-Mf | 25 mer | CUGCCAUUUAAUUAGCUGCAUAUCA | 357 |
| 2313 | commons | Sense | | |
| | | Strand | | |
| KHK-2265- | Hs-Mf | 25 mer | UGCCAUUUAAUUAGCUGCAUAUCAC | 358 |
| 2314 | commons | Sense | | |
| | | Strand | | |
| KHK-2266- | Hs-Mf | 25 mer | GCCAUUUAAUUAGCUGCAUAUCACC | 359 |
| 2315 | commons | Sense | | |
| | | Strand | | |
| KHK-2299 | Hs | 25 mer | CAGCACUUAACGCAAUCUGCCUCAA | 360 |
| | unique | Sense | | |
| | | Strand | | |
| KHK-2317- | Hs-Mf | 25 mer | GCCUCAAUUUCUUCAUCUGUCAAAT | 361 |
| 2366 | commons | Sense | | |
| | | Strand | | |
| KHK-2318- | Hs-Mf | 25 mer | CCUCAAUUUCUUCAUCUGUCAAATG | 362 |
| 2367 | commons | Sense | | |
| | | Strand | | |
| KHK-2319- | Hs-Mf | 25 mer | CUCAAUUUCUUCAUCUGUCAAAUGG | 363 |
| 2368 | commons | Sense | | |
| | | Strand | | |
| KHK-2320- | Hs-Mf | 25 mer | UCAAUUUCUUCAUCUGUCAAAUGGA | 364 |
| 2369 | commons | Sense | | |
| | | Strand | | |
| KHK-2321- | Hs-Mf | 25 mer | CAAUUUCUUCAUCUGUCAAAUGGAA | 365 |
| 2370 | commons | Sense | | |
| | | Strand | | |
| KHK-2322- | Hs-Mf | 25 mer | AAUUUCUUCAUCUGUCAAAUGGAAC | 366 |
| 2371 | commons | Sense | | |
| | | Strand | | |
| KHK-2323- | Hs-Mf | 25 mer | AUUUCUUCAUCUGUCAAAUGGAACC | 367 |
| 2372 | commons | Sense | | |
| | | Strand | | |
| KHK-2324- | Hs-Mf | 25 mer | UUUCUUCAUCUGUCAAAUGGAACCA | 368 |
| 2373 | commons | Sense | | |
| | | Strand | | |
| KHK-2325- | Hs-Mf | 25 mer | UUCUUCAUCUGUCAAAUGGAACCAA | 369 |
| 2374 | commons | Sense | | |
| | | Strand | | |
| KHK-2326- | Hs-Mf | 25 mer | UGUUCAUCUGUCAAAUGGAACCAAT | 370 |
| 2375 | commons | Sense | | |
| | | Strand | | |
| KHK-2332 | Hs | 25 mer | UCUGUCAAAUGGAACCAAUUCUGCT | 371 |
| | unique | Sense | | |
| | | Strand | | |
| KHK-2333 | Hs | 25 mer | CUGUCAAAUGGAACCAAUUCUGCTT | 372 |
| | unique | Sense | | |
| | | Strand | | |
| KHK-2335 | Hs | 25 mer | GUCAAAUGGAACCAAUUCUGCUUGG | 373 |
| | unique | Sense | | |
| | | Strand | | |
| KHK-2340 | Hs | 25 mer | AUGGAACCAAUUCUGCUUGGCUACA | 374 |
| | unique | Sense | | |
| | | Strand | | |
| KHK-2341 | Hs | 25 mer | UGGAACCAAUUCUGCUUGGCUACAG | 375 |
| | unique | Sense | | |
| | | Strand | | |
| KHK-2346 | Hs | 25 mer | CCAAUUCUGCUUGGCUACAGAAUTA | 376 |
| | unique | Sense | | |
| | | Strand | | |
| KHK-2352 | Hs | 25 mer | CUGCUUGGCUACAGAAUUAUUGUGA | 377 |
| | unique | Sense | | |
| | | Strand | | |
| KHK-2358 | Hs | 25 mer | GGCUACAGAAUUAUUGUGAGGAUAA | 378 |
| | unique | Sense | | |
| | | Strand | | |
| KHK-2359 | Hs | 25 mer | GCUACAGAAUUAUUGUGAGGAUAAA | 379 |
| | unique | Sense | | |
| | | Strand | | |
| KHK-2360 | Hs | 25 mer | CUACAGAAUUAUUGUGAGGAUAAAA | 380 |
| | unique | Sense | | |
| | | Strand | | |
| KHK-2361 | Hs | 25 mer | UACAGAAUUAUUGUGAGGAUAAAAT | 381 |
| | unique | Sense | | |
| | | Strand | | |
| KHK-2362 | Hs | 25 mer | ACAGAAUUAUUGUGAGGAUAAAATC | 382 |
| | unique | Sense | | |
| | | Strand | | |
| KHK-2363 | Hs | 25 mer | CAGAAUUAUUGUGAGGAUAAAAUCA | 383 |
| | unique | Sense | | |
| | | Strand | | |
| KHK-2364 | Hs | 25 mer | AGAAUUAUUGUGAGGAUAAAAUCAT | 384 |
| | unique | Sense | | |
| | | Strand | | |
| KHK-2365 | Hs | 25 mer | GAAUUAUUGUGAGGAUAAAAUCATA | 385 |
| | unique | Sense | | |
| | | Strand | | |
| KHK-2366 | Hs | 25 mer | AAUUAUUGUGAGGAUAAAAUCAUAT | 386 |
| | unique | Sense | | |
| | | Strand | | |
| KHK-2367 | Hs | 25 mer | AUUAUUGUGAGGAUAAAAUCAUATA | 387 |
| | unique | Sense | | |
| | | Strand | | |
| KHK-115- | Hs-Mf | 27mer | CGAGAAUGCAAAGAGAAAAUGCGCUAC | 388 |
| 154 | commons | Anti-sense | | |
| | | Strand | | |
| KHK-116- | Hs-Mf | 27mer | UCGAGAAUGCAAAGAGAAAAUGCGCUA | 389 |
| 155 | commons | Anti-sense | | |
| | | Strand | | |
| KHK-117- | Hs-Mf | 27mer | CUCGAGAAUGCAAAGAGAAAAUGCGCU | 390 |
| 156 | commons | Anti-sense | | |
| | | Strand | | |
| KHK-118- | Hs-Mf | 27mer | UCUCGAGAAUGCAAAGAGAAAAUGCGC | 391 |
| 157 | commons | Anti-sense | | |
| | | Strand | | |
| KHK-119- | Hs-Mf | 27mer | AUCUCGAGAAUGCAAAGAGAAAAUGCG | 392 |
| 158 | commons | Anti-sense | | |
| | | Strand | | |
| KHK-120- | Hs-Mf | 27mer | GAUCUGGAGAAUGCAAAGAGAAAAUGC | 393 |
| 159 | commons | Anti-sense | | |
| | | Strand | | |
| KHK-121- | Hs-Mf | 27mer | CGAUCUGGAGAAUGCAAAGAGAAAAUG | 394 |
| 160 | commons | Anti-sense | | |
| | | Strand | | |
| KHK-122- | Hs-Mf | 27mer | GCGAUCUCGAGAAUGCAAAGAGAAAAU | 395 |
| 161 | commons | Anti-sense | | |
| | | Strand | | |
| KHK-123- | Hs-Mf | 27mer | AGCGAUCUCGAGAAUGCAAAGAGAAAA | 396 |
| 162 | commons | Anti-sense | | |
| | | Strand | | |
| KHK-124- | Hs-Mf | 27mer | AAGCGAUCUCGAGAAUGCAAAGAGAAA | 397 |
| 163 | commons | Anti-sense | | |
| | | Strand | | |
| KHK-125- | Hs-Mf | 27mer | UAAGCGAUCUCGAGAAUGCAAAGAGAA | 398 |
| 164 | commons | Anti-sense | | |
| | | Strand | | |
| KHK-126- | Hs-Mf | 27mer | CUAAGCGAUCUCGAGAAUGCAAAGAGA | 399 |
| 165 | commons | Anti-sense | | |
| | | Strand | | |
| KHK-127- | Hs-Mf | 27mer | GCUAAGCGAUCUCGAGAAUGCAAAGAG | 400 |
| 166 | commons | Anti-sense | | |
| | | Strand | | |
| KHK-128- | Hs-Mf | 27mer | GGCUAAGCGAUCUCGAGAAUGCAAAGA | 401 |
| 167 | commons | Anti-sense | | |
| | | Strand | | |
| KHK-179 | Hs | 27mer | UUCCUCGCUUGUCAGAUGGACUCACAG | 402 |
| | unique | Anti-sense | | |
| | | Strand | | |
| KHK-181- | Hs-Mf | 27mer | GUUUCCUCGCUUGUCAGAUGGACUCAC | 403 |
| 220 | commons | Anti-sense | | |
| | | Strand | | |
| KHK-182- | Hs-Mf | 27mer | AGUUUCCUCGCUUGUCAGAUGGACUCA | 404 |
| 221 | commons | Anti-sense | | |
| | | Strand | | |
| KHK-183- | Hs-Mf | 27mer | UAGUUUCCUCGCUUGUCAGAUGGACUC | 405 |
| 222 | commons | Anti-sense | | |
| | | Strand | | |
| KHK-184- | Hs-Mf | 27mer | UUAGUUUCCUCGCUUGUCAGAUGGACU | 406 |
| 223 | commons | Anti-sense | | |
| | | Strand | | |
| KHK-185- | Hs-Mf | 27mer | CUUAGUUUCCUCGCUUGUCAGAUGGAC | 407 |
| 224 | commons | Anti-sense | | |
| | | Strand | | |
| KHK-186- | Hs-Mf | 27mer | CCUUAGUUUCCUCGCUUGUCAGAUGGA | 408 |
| 225 | commons | Anti-sense | | |
| | | Strand | | |
| KHK-187- | Hs-Mf | 27mer | GCCUUAGUUUCCUCGCUUGUCAGAUGG | 409 |
| 226 | commons | Anti-sense | | |
| | | Strand | | |
| KHK-188- | Hs-Mf | 27mer | AGCCUUAGUUUCCUCGCUUGUCAGAUG | 410 |
| 227 | commons | Anti-sense | | |
| | | Strand | | |
| KHK-431- | Hs-Mf | 27mer | CCUCUUAUCCAGGAGGAUGGUGUCCCC | 411 |
| 470 | commons | Anti-sense | | |
| | | Strand | | |
| KHK-432- | Hs-Mf | 27mer | GCCUCUUAUCCAGGAGGAUGGUGUCCC | 412 |
| 471 | commons | Anti-sense | | |
| | | Strand | | |
| KHK-433- | Hs-Mf | 27mer | UGCCUCUUAUCCAGGAGGAUGGUGUCC | 413 |
| 472 | commons | Anti-sense | | |
| | | Strand | | |
| KHK-507- | Hs-Mf- | 27mer | GGAUCUGCUUCUCUUCCAUGAGGCUAC | 414 |
| 545-376- | Mm-Rn | Anti-sense | | |
| 218 | commons | Strand | | |
| KHK-508- | Hs-Mf- | 27mer | AGGAUCUGCUUCUCUUCCAUGAGGCUA | 415 |
| 546-377- | Mm-Rn | Anti-sense | | |
| 219 | commons | Strand | | |
| KHK-509- | Hs-Mf- | 27mer | CAGGAUCUGCUUCUCUUCCAUGAGGCU | 416 |
| 547-378- | Mm-Rn | Anti-sense | | |
| 220 | commons | Strand | | |
| KHK-510- | Hs-Mf- | 27mer | ACAGGAUCUGCUUCUCUUCCAUGAGGC | 417 |
| 548-379- | Mm-Rn | Anti-sense | | |
| 221 | commons | Strand | | |
| KHK-511- | Hs-Mf- | 27mer | CACAGGAUCUGCUUCUCUUCCAUGAGG | 418 |
| 549-380- | Mm-Rn | Anti-sense | | |
| 222 | commons | Strand | | |
| KHK-512- | Hs-Mf- | 27mer | GCACAGGAUCUGCUUCUCUUCCAUGAG | 419 |
| 550-381- | Mm-Rn | Anti-sense | | |
| 223 | commons | Strand | | |
| KHK-513- | Hs-Mf- | 27mer | CGCACAGGAUCUGCUUCUCUUCCAUGA | 420 |
| 551-382- | Mm-Rn | Anti-sense | | |
| 224 | commons | Strand | | |
| KHK-514- | Hs-Mf- | 27mer | AGGCACAGGAUCUGCUUCUCUUCCAUG | 421 |
| 552-383- | Mm-Rn | Anti-sense | | |
| 225 | commons | Strand | | |
| KHK-515- | Hs-Mf- | 27mer | CAGGCACAGGAUCUGCUUCUCUUCCAU | 422 |
| 553-384- | Mm-Rn | Anti-sense | | |
| 226 | commons | Strand | | |
| KHK-516- | Hs-Mf- | 27mer | CCAGGCACAGGAUCUGCUUCUCUUCCA | 423 |
| 554-385- | Mm-Rn | Anti-sense | | |
| 227 | commons | Strand | | |
| KHK-517- | Hs-Mf- | 27mer | CCCACGCACAGGAUCUGCUUCUCUUCC | 424 |
| 555-386- | Mm-Rn | Anti-sense | | |
| 228 | commons | Strand | | |
| KHK-518- | Hs-Mf- | 27mer | CCCCACGCACAGGAUCUGCUUCUCUUC | 425 |
| 556-387- | Mm-Rn | Anti-sense | | |
| 229 | commons | Strand | | |
| KHK-520- | Hs-Mf- | 27mer | AGCCCCACGCACAGGAUCUGCUUCUCU | 426 |
| 558-389- | Mm-Rn | Anti-sense | | |
| 231 | commons | Strand | | |
| KHK-521- | Hs-Mf- | 27mer | UAGCCCCACGCACAGGAUCUGCUUCUC | 427 |
| 559-390- | Mm-Rn | Anti-sense | | |
| 232 | commons | Strand | | |
| KHK-522- | Hs-Mf- | 27mer | CUAGCCCCACGCACAGGAUCUGCUUCU | 428 |
| 560-391- | Mm-Rn | Anti-sense | | |
| 233 | commons | Strand | | |
| KHK-541- | Hs-Mf | 27mer | CUGAUGACGUCCAGCACCACUAGCCCC | 429 |
| 579 | commons | Anti-sense | | |
| | | Strand | | |
| KHK-544- | Hs-Mf | 27mer | AGGCUGAUGACGUCCAGCACCACUAGC | 430 |
| 582 | commons | Anti-sense | | |
| | | Strand | | |
| KHK-546- | Hs-Mf | 27mer | CCAGGCUGAUGACGUCCAGCACCACUA | 431 |
| 584 | commons | Anti-sense | | |
| | | Strand | | |
| KHK-547- | Hs-Mf | 27mer | ACCAGGCUGAUGACGUCCAGCACCACU | 432 |
| 585 | commons | Anti-sense | | |
| | | Strand | | |
| KHK-548- | Hs-Mf | 27mer | CACCAGGCUGAUGACGUCCAGCACCAC | 433 |
| 586 | commons | Anti-sense | | |
| | | Strand | | |
| KHK-549- | Hs-Mf | 27mer | CCACCAGGCUGAUGACGUCCAGCACCA | 434 |
| 587 | commons | Anti-sense | | |
| | | Strand | | |
| KHK-550- | Hs-Mf | 27mer | UCCACCAGGCUGAUGACGUCCAGCACC | 435 |
| 588 | commons | Anti-sense | | |
| | | Strand | | |
| KHK-551- | Hs-Mf | 27mer | GUCCACCAGGCUGAUGACGUCCAGCAC | 436 |
| 589 | commons | Anti-sense | | |
| | | Strand | | |
| KHK-552- | Hs-Mf | 27mer | UGUCCACCAGGCUGAUGACGUCCAGCA | 437 |
| 590 | commons | Anti-sense | | |
| | | Strand | | |
| KHK-553- | Hs-Mf | 27mer | UUGUCCACCAGGCUGAUGACGUCCAGC | 438 |
| 591 | commons | Anti-sense | | |
| | | Strand | | |
| KHK-554- | Hs-Mf | 27mer | CUUGUCCACCAGGCUGAUGACGUCCAG | 439 |
| 592 | commons | Anti-sense | | |
| | | Strand | | |
| KHK-555- | Hs-Mf | 27mer | ACUUGUCCACCAGGCUGAUGACGUCCA | 440 |
| 593 | commons | Anti-sense | | |
| | | Strand | | |
| KHK-556- | Hs-Mf | 27mer | UACUUGUCCACCAGGCUGAUGACGUCC | 441 |
| 594 | commons | Anti-sense | | |
| | | Strand | | |
| KHK-557- | Hs-Mf | 27mer | GUACUUGUCCACCAGGCUGAUGACGUC | 442 |
| 595 | commons | Anti-sense | | |
| | | Strand | | |
| KHK-558- | Hs-Mf | 27mer | GGUACUUGUCCACCAGGCUGAUGACGU | 443 |
| 596 | commons | Anti-sense | | |
| | | Strand | | |
| KHK-559- | Hs-Mf | 27mer | GGGUACUUGUCCACCAGGCUGAUGACG | 444 |
| 597 | commons | Anti-sense | | |
| | | Strand | | |
| KHK-560- | Hs-Mf | 27mer | AGGGUACUUGUCCACCAGGCUGAUGAC | 445 |
| 598 | commons | Anti-sense | | |
| | | Strand | | |
| KHK-561- | Hs-Mf | 27mer | UAGGGUACUUGUCCACCAGGCUGAUGA | 446 |
| 599 | commons | Anti-sense | | |
| | | Strand | | |
| KHK-562- | Hs-Mf | 27mer | UUAGGGUACUUGUCCACCAGGCUGAUG | 447 |
| 600 | commons | Anti-sense | | |
| | | Strand | | |
| KHK-563- | Hs-Mf | 27mer | CUUAGGGUACUUGUCCACCAGGCUGAU | 448 |
| 601 | commons | Anti-sense | | |
| | | Strand | | |
| KHK-564- | Hs-Mf | 27mer | CCUUAGGGUACUUGUCCACCAGGCUGA | 449 |
| 602 | commons | Anti-sense | | |
| | | Strand | | |
| KHK-565- | Hs-Mf | 27mer | UCCUUAGGGUACUUGUCCACCAGGCUG | 450 |
| 603 | commons | Anti-sense | | |
| | | Strand | | |
| KHK-566- | Hs-Mf | 27mer | CUCCUUAGGGUACUUGUCCACCAGGCU | 451 |
| 604 | commons | Anti-sense | | |
| | | Strand | | |
| KHK-567- | Hs-Mf | 27mer | CCUCCUUAGGGUACUUGUCCACCAGGC | 452 |
| 605 | commons | Anti-sense | | |
| | | Strand | | |
| KHK-568- | Hs-Mf | 27mer | UCCUCCUUAGGGUACUUGUCCACCAGG | 453 |
| 606 | commons | Anti-sense | | |
| | | Strand | | |
| KHK-569- | Hs-Mf | 27mer | GUCCUCCUUAGGGUACUUGUCCACCAG | 454 |
| 607 | commons | Anti-sense | | |
| | | Strand | | |
| KHK-570- | Hs-Mf | 27mer | AGUCCUCCUUAGGGUACUUGUCCACCA | 455 |
| 608 | commons | Anti-sense | | |
| | | Strand | | |
| KHK-571- | Hs-Mf | 27mer | GAGUCCUCCUUAGGGUACUUGUCCACC | 456 |
| 609 | commons | Anti-sense | | |
| | | Strand | | |
| KHK-572- | Hs-Mf | 27mer | CGAGUCCUCCUUAGGGUACUUGUCCAC | 457 |
| 610 | commons | Anti-sense | | |
| | | Strand | | |
| KHK-573- | Hs-Mf | 27mer | CCGAGUCCUCCUUAGGGUACUUGUCCA | 458 |
| 611 | commons | Anti-sense | | |
| | | Strand | | |
| KHK-574- | Hs-Mf | 27mer | UCCGAGUCCUCCUUAGGGUACUUGUCC | 459 |
| 612 | commons | Anti-sense | | |
| | | Strand | | |
| KHK-575- | Hs-Mf | 27mer | CUCCGAGUCCUCCUUAGGGUACUUGUC | 460 |
| 613 | commons | Anti-sense | | |
| | | Strand | | |
| KHK-576- | Hs-Mf | 27mer | UCUCCGAGUCCUCCUUAGGGUACUUGU | 461 |
| 614 | commons | Anti-sense | | |
| | | Strand | | |
| KHK-577- | Hs-Mf | 27mer | AUCUCCGAGUCCUCCUUAGGGUACUUG | 462 |
| 615 | commons | Anti-sense | | |
| | | Strand | | |
| KHK-638- | Hs-Mf | 27mer | GAGAACGGUGCAGGAGUUGGACGCGUU | 463 |
| 676 | commons | Anti-sense | | |
| | | Strand | | |
| KHK-641- | Hs-Mf | 27mer | GGAGAGAACGGUGCAGGAGUUGGACGC | 464 |
| 679 | commons | Anti-sense | | |
| | | Strand | | |
| KHK-642- | Hs-Mf | 27mer | GGGAGAGAACGGUGCAGGAGUUGGACG | 465 |
| 680 | commons | Anti-sense | | |
| | | Strand | | |
| KHK-643- | Hs-Mf | 27mer | AGGGAGAGAACGGUGCAGGAGUUGGAC | 466 |
| 681 | commons | Anti-sense | | |
| | | Strand | | |
| KHK-644- | Hs-Mf | 27mer | CAGGGAGAGAACGGUGCAGGAGUUGGA | 467 |
| 682 | commons | Anti-sense | | |
| | | Strand | | |
| KHK-645- | Hs-Mf | 27mer | GCAGGGAGAGAACGGUGCAGGAGUUGG | 468 |
| 683 | commons | Anti-sense | | |
| | | Strand | | |
| KHK-646- | Hs-Mf | 27mer | AGCAGGGAGAGAACGGUGCAGGAGUUG | 469 |
| 684 | commons | Anti-sense | | |
| | | Strand | | |
| KHK-647- | Hs-Mf | 27mer | GAGCAGGGAGAGAACGGUGCAGGAGUU | 470 |
| 685 | commons | Anti-sense | | |
| | | Strand | | |
| KHK-650- | Hs-Mf | 27mer | UCCGAGCAGGGAGAGAACGGUGCAGGA | 471 |
| 688 | commons | Anti-sense | | |
| | | Strand | | |
| KHK-676- | Hs-Mf | 27mer | AUUGAGCCCAUGAAGGCACAGGGGGCU | 472 |
| 714 | commons | Anti-sense | | |
| | | Strand | | |
| KHK-713- | Hs-Mf | 27mer | GUCGGCCACCAGGAAGUCAGCAACAUG | 473 |
| 722 | commons | Anti-sense | | |
| | | Strand | | |
| KHK-826- | Hs-Mf | 27mer | UGGAGCACAAUGGUACGGUUGCCAUUG | 474 |
| 835 | commons | Anti-sense | | |
| | | Strand | | |
| KHK-827- | Hs-Mf | 27mer | AUGGAGCACAAUGGUACGGUUGCCAUU | 475 |
| 836 | commons | Anti-sense | | |
| | | Strand | | |
| KHK-829- | Hs-Mf | 27mer | UCAUGGAGCACAAUGGUACGGUUGCCA | 476 |
| 838 | commons | Anti-sense | | |
| | | Strand | | |
| KHK-830- | Hs-Mf | 27mer | GUCAUGGAGCACAAUGGUACGGUUGCC | 477 |
| 839 | commons | Anti-sense | | |
| | | Strand | | |
| KHK-831- | Hs-Mf | 27mer | UGUCAUGGAGCACAAUGGUACGGUUGC | 478 |
| 840 | commons | Anti-sense | | |
| | | Strand | | |
| KHK-832- | Hs-Mf | 27mer | GUGUCAUGGAGCACAAUGGUACGGUUG | 479 |
| 841 | commons | Anti-sense | | |
| | | Strand | | |
| KHK-857- | Hs-Mf | 27mer | UGUAGCAGACACAUCUGGCAGGCUCGU | 480 |
| 895 | commons | Anti-sense | | |
| | | Strand | | |
| KHK-858- | Hs-Mf | 27mer | CUGUAGCAGACACAUCUGGCAGGCUCG | 481 |
| 896 | commons | Anti-sense | | |
| | | Strand | | |
| KHK-859- | Hs-Mf | 27mer | UCUGUAGCAGACACAUCUGGCAGGCUC | 482 |
| 897 | commons | Anti-sense | | |
| | | Strand | | |
| KHK-860- | Hs-Mf- | 27mer | GUCUGUAGCAGACACAUCUGGCAGGCU | 483 |
| 898-729- | Mm-Rn | Anti-sense | | |
| 571 | commons | Strand | | |
| KHK-861- | Hs-Mf- | 27mer | AGUCUGUAGCAGACACAUCUGGCAGGC | 484 |
| 899-730- | Mm-Rn | Anti-sense | | |
| 572 | commons | Strand | | |
| KHK-862- | Hs-Mf | 27mer | AAGUCUGUAGCAGACACAUCUGGCAGG | 485 |
| 900 | commons | Anti-sense | | |
| | | Strand | | |
| KHK-865 | Hs | 27mer | UCAAAGUCUGUAGCAGACACAUCUGGC | 486 |
| | unique | Anti-sense | | |
| | | Strand | | |
| KHK-880 | Hs | 27mer | GUCAGAUCAACCUUCUCAAAGUCUGUA | 487 |
| | unique | Anti-sense | | |
| | | Strand | | |
| KHK-882- | Hs-Mf | 27mer | GGGUCAGAUCAACCUUCUCAAAGUCUG | 488 |
| 920 | commons | Anti-sense | | |
| | | Strand | | |
| KHK-883- | Hs-Mf | 27mer | UGGGUCAGAUCAACCUUCUCAAAGUCU | 489 |
| 921 | commons | Anti-sense | | |
| | | Strand | | |
| KHK-884- | Hs-Mf | 27mer | CUGGGUCAGAUCAACCUUCUCAAAGUC | 490 |
| 922 | commons | Anti-sense | | |
| | | Strand | | |
| KHK-885- | Hs-Mf | 27mer | ACUGGGUCAGAUCAACCUUCUCAAAGU | 491 |
| 923 | commons | Anti-sense | | |
| | | Strand | | |
| KHK-886- | Hs-Mf | 27mer | AACUGGGUCAGAUCAACCUUCUCAAAG | 492 |
| 924 | commons | Anti-sense | | |
| | | Strand | | |
| KHK-887- | Hs-Mf | 27mer | GAACUGGGUCAGAUCAACCUUCUCAAA | 493 |
| 925 | commons | Anti-sense | | |
| | | Strand | | |
| KHK-888- | Hs-Mf | 27mer | UGAACUGGGUCAGAUCAACCUUCUCAA | 494 |
| 926 | commons | Anti-sense | | |
| | | Strand | | |
| KHK-889- | Hs-Mf | 27mer | UUGAACUGGGUCAGAUCAACCUUCUCA | 495 |
| 927 | commons | Anti-sense | | |
| | | Strand | | |
| KHK-890- | Hs-Mf | 27mer | CUUGAACUGGGUCAGAUCAACCUUCUC | 496 |
| 928 | commons | Anti-sense | | |
| | | Strand | | |
| KHK-891- | Hs-Mf | 27mer | ACUUGAACUGGGUCAGAUCAACCUUCU | 497 |
| 929 | commons | Anti-sense | | |
| | | Strand | | |
| KHK-892- | Hs-Mf | 27mer | CACUUGAACUGGGUCAGAUCAACCUUC | 498 |
| 930 | commons | Anti-sense | | |
| | | Strand | | |
| KHK-893- | Hs-Mf | 27mer | CCACUUGAACUGGGUCAGAUCAACCUU | 499 |
| 931 | commons | Anti-sense | | |
| | | Strand | | |
| KHK-894- | Hs-Mf | 27mer | UCCACUUGAACUGGGUCAGAUCAACCU | 500 |
| 932 | commons | Anti-sense | | |
| | | Strand | | |
| KHK-895- | Hs-Mf | 27mer | AUCCACUUGAACUGGGUCAGAUCAACC | 501 |
| 933 | commons | Anti-sense | | |
| | | Strand | | |
| KHK-896- | Hs-Mf | 27mer | GAUCCACUUGAACUGGGUCAGAUCAAC | 502 |
| 934 | commons | Anti-sense | | |
| | | Strand | | |
| KHK-897- | Hs-Mf | 27mer | GGAUCCACUUGAACUGGGUCAGAUCAA | 503 |
| 935 | commons | Anti-sense | | |
| | | Strand | | |
| KHK-898- | Hs-Mf | 27mer | UGGAUCCACUUGAACUGGGUCAGAUCA | 504 |
| 936 | commons | Anti-sense | | |
| | | Strand | | |
| KHK-899- | Hs-Mf | 27mer | GUGGAUCCACUUGAACUGGGUCAGAUC | 505 |
| 937 | commons | Anti-sense | | |
| | | Strand | | |
| KHK-900- | Hs-Mf | 27mer | UGUGGAUCCACUUGAACUGGGUCAGAU | 506 |
| 938 | commons | Anti-sense | | |
| | | Strand | | |
| KHK-901- | Hs-Mf | 27mer | AUGUGGAUCCACUUGAACUGGGUCAGA | 507 |
| 939 | commons | Anti-sense | | |
| | | Strand | | |
| KHK-902- | Hs-Mf | 27mer | AAUGUGGAUCCACUUGAACUGGGUCAG | 508 |
| 940 | commons | Anti-sense | | |
| | | Strand | | |
| KHK-903- | Hs-Mf | 27mer | CAAUGUGGAUCCACUUGAACUGGGUCA | 509 |
| 941 | commons | Anti-sense | | |
| | | Strand | | |
| KHK-904- | Hs-Mf | 27mer | UCAAUGUGGAUCCACUUGAACUGGGUC | 510 |
| 942 | commons | Anti-sense | | |
| | | Strand | | |
| KHK-905- | Hs-Mf | 27mer | CUCAAUGUGGAUCCACUUGAACUGGGU | 511 |
| 943 | commons | Anti-sense | | |
| | | Strand | | |
| KHK-906- | Hs-Mf | 27mer | CCUCAAUGUGGAUCCACUUGAACUGGG | 512 |
| 944 | commons | Anti-sense | | |
| | | Strand | | |
| KHK-907- | Hs-Mf | 27mer | CCCUCAAUGUGGAUCCACUUGAACUGG | 513 |
| 945 | commons | Anti-sense | | |
| | | Strand | | |
| KHK-908- | Hs-Mf- | 27mer | GCCCUCAAUGUGGAUCCACUUGAACUG | 514 |
| 946-777- | Mm-Rn | Anti-sense | | |
| 619 | commons | Strand | | |
| KHK-909- | Hs-Mf- | 27mer | GGCCCUCAAUGUGGAUCCACUUGAACU | 515 |
| 947-778- | Mm-Rn | Anti-sense | | |
| 620 | commons | Strand | | |
| KHK-910- | Hs-Mf- | 27mer | CGGCCCUCAAUGUGGAUCCACUUGAAC | 516 |
| 948-779- | Mm-Rn | Anti-sense | | |
| 621 | commons | Strand | | |
| KHK-911- | Hs-Mf- | 27mer | CCGGCCCUCAAUGUGGAUCCACUUGAA | 517 |
| 949-780- | Mm-Rn | Anti-sense | | |
| 622 | commons | Strand | | |
| KHK-912- | Hs-Mf- | 27mer | UCCGGCCCUCAAUGUGGAUCCACUUGA | 518 |
| 950-781- | Mm-Rn | Anti-sense | | |
| 623 | commons | Strand | | |
| KHK-913- | Hs-Mf- | 27mer | UUCCGGCCCUCAAUGUGGAUCCACUUG | 519 |
| 951-782- | Mm-Rn | Anti-sense | | |
| 624 | commons | Strand | | |
| KHK-914- | Hs-Mf- | 27mer | GUUCCGGCCCUCAAUGUGGAUCCACUU | 520 |
| 952-783- | Mm-Rn | Anti-sense | | |
| 625 | commons | Strand | | |
| KHK-939- | Hs-Mf | 27mer | GCAGCAUCUUCACCUGCUCCGAUGCGU | 521 |
| 977 | commons | Anti-sense | | |
| | | Strand | | |
| KHK-940- | Hs-Mf | 27mer | UGCAGCAUCUUCACCUGCUCCGAUGCG | 522 |
| 978 | commons | Anti-sense | | |
| | | Strand | | |
| KHK-941- | Hs-Mf | 27mer | CUGCAGCAUCUUCACCUGCUCCGAUGC | 523 |
| 979 | commons | Anti-sense | | |
| | | Strand | | |
| KHK-942- | Hs-Mf | 27mer | GCUGCAGCAUCUUCACCUGCUCCGAUG | 524 |
| 980 | commons | Anti-sense | | |
| | | Strand | | |
| KHK-943- | Hs-Mf | 27mer | CGCUGCAGCAUCUUCACCUGCUCCGAU | 525 |
| 981 | commons | Anti-sense | | |
| | | Strand | | |
| KHK-944- | Hs-Mf | 27mer | CCGCUGCAGCAUCUUCACCUGCUCCGA | 526 |
| 982 | commons | Anti-sense | | |
| | | Strand | | |
| KHK-945- | Hs-Mf | 27mer | UCCGCUGCAGCAUCUUCACCUGCUCCG | 527 |
| 983 | commons | Anti-sense | | |
| | | Strand | | |
| KHK-946- | Hs-Mf | 27mer | AUCCGCUGCAGCAUCUUCACCUGCUCC | 528 |
| 984 | commons | Anti-sense | | |
| | | Strand | | |
| KHK-947- | Hs-Mf | 27mer | UAUCCGCUGCAGCAUCUUCACCUGCUC | 529 |
| 985 | commons | Anti-sense | | |
| | | Strand | | |
| KHK-948- | Hs-Mf- | 27mer | CUAUCCGCUGCAGCAUCUUCACCUGCU | 530 |
| 986-817 | Mm | Anti-sense | | |
| | commons | Strand | | |
| KHK-949- | Hs-Mf- | 27mer | UCUAUCCGCUGCAGCAUCUUCACCUGC | 531 |
| 987-818 | Mm | Anti-sense | | |
| | commons | Strand | | |
| KHK-950- | Hs-Mf- | 27mer | GUCUAUCCGCUGCAGCAUCUUCACCUG | 532 |
| 988-819 | Mm | Anti-sense | | |
| | commons | Strand | | |
| KHK-951- | Hs-Mf- | 27mer | CGUCUAUCCGCUGCAGCAUCUUCACCU | 533 |
| 989-820 | Mm | Anti-sense | | |
| | commons | Strand | | |
| KHK-952- | Hs-Mf- | 27mer | GCGUCUAUCCGCUGCAGCAUCUUCACC | 534 |
| 990-821 | Mm | Anti-sense | | |
| | commons | Strand | | |
| KHK-953- | Hs-Mf- | 27mer | UGCGUCUAUCCGCUGCAGCAUCUUCAC | 535 |
| 991-822 | Mm | Anti-sense | | |
| | commons | Strand | | |
| KHK-954- | Hs-Mf- | 27mer | GUGCGUCUAUCCGCUGCAGCAUCUUCA | 536 |
| 992-823 | Mm | Anti-sense | | |
| | commons | Strand | | |
| KHK-955- | Hs-Mf- | 27mer | UGUGCGUCUAUCCGCUGCAGCAUCUUC | 537 |
| 993-824 | Mm | Anti-sense | | |
| | commons | Strand | | |
| KHK-956- | Hs-Mf | 27mer | GUGUGCGUCUAUCCGCUGCAGCAUCUU | 538 |
| 994 | commons | Anti-sense | | |
| | | Strand | | |
| KHK-957- | Hs-Mf | 27mer | UGUGUGCGUCUAUCCGCUGCAGCAUCU | 539 |
| 995 | commons | Anti-sense | | |
| | | Strand | | |
| KHK-958- | Hs-Mf | 27mer | UUGUGUGCGUCUAUCCGCUGCAGCAUC | 540 |
| 996 | commons | Anti-sense | | |
| | | Strand | | |
| KHK-978- | Hs-Mf | 27mer | GCUCUGGAGGCUGCCUGGUGUUGUGUG | 541 |
| 1016 | commons | Anti-sense | | |
| | | Strand | | |
| KHK-982- | Hs-Mf | 27mer | UUCUGCUCUGGAGGCUGCCUGGUGUUG | 542 |
| 1020 | commons | Anti-sense | | |
| | | Strand | | |
| KHK-983- | Hs-Mf | 27mer | CUUCUGCUCUGGAGGCUGCCUGGUGUU | 543 |
| 1021 | commons | Anti-sense | | |
| | | Strand | | |
| KHK-984- | Hs-Mf | 27mer | UCUUCUGCUCUGGAGGCUGCCUGGUGU | 544 |
| 1022 | commons | Anti-sense | | |
| | | Strand | | |
| KHK-985- | Hs-Mf | 27mer | AUCUUCUGCUCUGGAGGCUGCCUGGUG | 545 |
| 1023 | commons | Anti-sense | | |
| | | Strand | | |
| KHK-991- | Hs-Mf | 27mer | ACCCGGAUCUUCUGCUCUGGAGGCUGC | 546 |
| 1029 | commons | Anti-sense | | |
| | | Strand | | |
| KHK-992- | Hs-Mf | 27mer | CACCCGGAUCUUCUGCUCUGGAGGCUG | 547 |
| 1030 | commons | Anti-sense | | |
| | | Strand | | |
| KHK-993- | Hs-Mf | 27mer | ACACCCGGAUCUUCUGCUCUGGAGGCU | 548 |
| 1031 | commons | Anti-sense | | |
| | | Strand | | |
| KHK-999- | Hs-Mf | 27mer | CCACGGACACCCGGAUCUUCUGCUCUG | 549 |
| 1037 | commons | Anti-sense | | |
| | | Strand | | |
| KHK-1000- | Hs-Mf | 27mer | UCCACGGACACCCGGAUCUUCUGCUCU | 550 |
| 1038 | commons | Anti-sense | | |
| | | Strand | | |
| KHK-1019- | Hs-Mf | 27mer | CUCUCGUGGCUUCUCCACCUCCACGGA | 551 |
| 1057 | commons | Anti-sense | | |
| | | Strand | | |
| KHK-1054- | Hs-Mf | 27mer | ACCACGUCUCCGUAGCCAAACAGCUGG | 552 |
| 1092 | commons | Anti-sense | | |
| | | Strand | | |
| KHK-1055- | Hs-Mf | 27mer | CACCACGUCUCCGUAGCCAAACAGCUG | 553 |
| 1093 | commons | Anti-sense | | |
| | | Strand | | |
| KHK-1057- | Hs-Mf | 27mer | AACACCACGUCUCCGUAGCCAAACAGC | 554 |
| 1095 | commons | Anti-sense | | |
| | | Strand | | |
| KHK-1058- | Hs-Mf | 27mer | AAACACCACGUCUCCGUAGCCAAACAG | 555 |
| 1096 | commons | Anti-sense | | |
| | | Strand | | |
| KHK-1059- | Hs-Mf | 27mer | CAAACACCACGUCUCCGUAGCCAAACA | 556 |
| 1097 | commons | Anti-sense | | |
| | | Strand | | |
| KHK-1060- | Hs-Mf | 27mer | ACAAACACCACGUCUCCGUAGCCAAAC | 557 |
| 1098 | commons | Anti-sense | | |
| | | Strand | | |
| KHK-1061- | Hs-Mf | 27mer | GACAAACACCACGUCUCCGUAGCCAAA | 558 |
| 1099 | commons | Anti-sense | | |
| | | Strand | | |
| KHK-1062- | Hs-Mf | 27mer | UGACAAACACCACGUCUCCGUAGCCAA | 559 |
| 1100 | commons | Anti-sense | | |
| | | Strand | | |
| KHK-1063- | Hs-Mf | 27mer | CUGACAAACACCACGUCUCCGUAGCCA | 560 |
| 1101 | commons | Anti-sense | | |
| | | Strand | | |
| KHK-1064- | Hs-Mf | 27mer | GCUGACAAACACCACGUCUCCGUAGCC | 561 |
| 1102 | commons | Anti-sense | | |
| | | Strand | | |
| KHK-1065- | Hs-Mf | 27mer | UGCUGACAAACACCACGUCUCCGUAGC | 562 |
| 1103 | commons | Anti-sense | | |
| | | Strand | | |
| KHK-1066- | Hs-Mf | 27mer | UUGCUGACAAACACCACGUCUCCGUAG | 563 |
| 1104 | commons | Anti-sense | | |
| | | Strand | | |
| KHK-1067- | Hs-Mf | 27mer | UUUGCUGACAAACACCACGUCUCCGUA | 564 |
| 1105 | commons | Anti-sense | | |
| | | Strand | | |
| KHK-1068- | Hs-Mf | 27mer | CUUUGCUGACAAACACCACGUCUCCGU | 565 |
| 1106 | commons | Anti-sense | | |
| | | Strand | | |
| KHK-1069- | Hs-Mf | 27mer | UCUUUGCUGACAAACACCACGUCUCCG | 566 |
| 1107 | commons | Anti-sense | | |
| | | Strand | | |
| KHK-1070- | Hs-Mf | 27mer | AUCUUUGCUGACAAACACCACGUCUCC | 567 |
| 1108 | commons | Anti-sense | | |
| | | Strand | | |
| KHK-1071- | Hs-Mf | 27mer | CAUCUUUGCUGACAAACACCACGUCUC | 568 |
| 1109 | commons | Anti-sense | | |
| | | Strand | | |
| KHK-1072- | Hs-Mf | 27mer | ACAUCUUUGCUGACAAACACCACGUCU | 569 |
| 1110 | commons | Anti-sense | | |
| | | Strand | | |
| KHK-1073- | Hs-Mf | 27mer | CACAUCUUUGCUGACAAACACCACGUC | 570 |
| 1111 | commons | Anti-sense | | |
| | | Strand | | |
| KHK-1074- | Hs-Mf- | 27mer | CCACAUCUUUGCUGACAAACACCACGU | 571 |
| 1112-943- | Mm-Rn | Anti-sense | | |
| 785 | commons | Strand | | |
| KHK-1075- | Hs-Mf- | 27mer | GCCACAUCUUUGCUGACAAACACCACG | 572 |
| 1113-944- | Mm-Rn | Anti-sense | | |
| 786 | commons | Strand | | |
| KHK-1076- | Hs-Mf- | 27mer | GGCCACAUCUUUGCUGACAAACACCAC | 573 |
| 1114-945- | Mm-Rn | Anti-sense | | |
| 787 | commons | Strand | | |
| KHK-1077- | Hs-Mf- | 27mer | UGGCCACAUCUUUGCUGACAAACACCA | 574 |
| 1115-946- | Mm-Rn | Anti-sense | | |
| 788 | commons | Strand | | |
| KHK-1078- | Hs-Mf- | 27mer | UUGGCCACAUCUUUGCUGACAAACACC | 575 |
| 1116-947- | Mm-Rn | Anti-sense | | |
| 789 | commons | Strand | | |
| KHK-1079- | Hs-Mf- | 27mer | CUUGGCCACAUCUUUGCUGACAAACAC | 576 |
| 1117-948- | Mm-Rn | Anti-sense | | |
| 790 | commons | Strand | | |
| KHK-1080- | Hs-Mf- | 27mer | GCUUGGCCACAUCUUUGCUGACAAACA | 577 |
| 1118-949- | Mm-Rn | Anti-sense | | |
| 791 | commons | Strand | | |
| KHK-1081- | Hs-Mf- | 27mer | UGCUUGGCCACAUCUUUGCUGACAAAC | 578 |
| 1119-950- | Mm-Rn | Anti-sense | | |
| 792 | commons | Strand | | |
| KHK-1082- | Hs-Mf- | 27mer | GUGCUUGGCCACAUCUUUGCUGACAAA | 579 |
| 1120-951- | Mm-Rn | Anti-sense | | |
| 793 | commons | Strand | | |
| KHK-1083- | Hs-Mf- | 27mer | AGUGCUUGGCCACAUCUUUGCUGACAA | 580 |
| 1121-952- | Mm-Rn | Anti-sense | | |
| 794 | commons | Strand | | |
| KHK-1084- | Hs-Mf- | 27mer | AAGUGCUUGGCCACAUCUUUGCUGACA | 581 |
| 1122-953- | Mm-Rn | Anti-sense | | |
| 795 | commons | Strand | | |
| KHK-1085- | Hs-Mf- | 27mer | CAAGUGCUUGGCCACAUCUUUGCUGAC | 582 |
| 1123-954- | Mm-Rn | Anti-sense | | |
| 796 | commons | Strand | | |
| KHK-1086- | Hs-Mf- | 27mer | CCAAGUGCUUGGCCACAUCUUUGCUGA | 583 |
| 1124-955- | Mm-Rn | Anti-sense | | |
| 797 | commons | Strand | | |
| KHK-1087- | Hs-Mf- | 27mer | CCCAAGUGCUUGGCCACAUCUUUGCUG | 584 |
| 1125-956- | Mm-Rn | Anti-sense | | |
| 798 | commons | Strand | | |
| KHK-1090- | Hs-Mf | 27mer | AACCCCAAGUGCUUGGCCACAUCUUUG | 585 |
| 1128 | commons | Anti-sense | | |
| | | Strand | | |
| KHK-1091- | Hs-Mf | 27mer | GAACCCCAAGUGCUUGGCCACAUCUUU | 586 |
| 1129 | commons | Anti-sense | | |
| | | Strand | | |
| KHK-1092- | Hs-Mf | 27mer | GGAACCCCAAGUGCUUGGCCACAUCUU | 587 |
| 1130 | commons | Anti-sense | | |
| | | Strand | | |
| KHK-1093- | Hs-Mf | 27mer | UGGAACCCCAAGUGCUUGGCCACAUCU | 588 |
| 1131 | commons | Anti-sense | | |
| | | Strand | | |
| KHK-1095- | Hs-Mf | 27mer | ACUGGAACCCCAAGUGCUUGGCCACAU | 589 |
| 1133 | commons | Anti-sense | | |
| | | Strand | | |
| KHK-1096- | Hs-Mf | 27mer | GACUGGAACCCCAAGUGCUUGGCCACA | 590 |
| 1134 | commons | Anti-sense | | |
| | | Strand | | |
| KHK-1097- | Hs-Mf | 27mer | UGACUGGAACCCCAAGUGCUUGGCCAC | 591 |
| 1135 | commons | Anti-sense | | |
| | | Strand | | |
| KHK-1099- | Hs-Mf | 27mer | GCUGACUGGAACCCCAAGUGCUUGGCC | 592 |
| 1137 | commons | Anti-sense | | |
| | | Strand | | |
| KHK-1100- | Hs-Mf | 27mer | UGCUGACUGGAACCCCAAGUGCUUGGC | 593 |
| 1138 | commons | Anti-sense | | |
| | | Strand | | |
| KHK-1101- | Hs-Mf | 27mer | CUGCUGACUGGAACCCCAAGUGCUUGG | 594 |
| 1139 | commons | Anti-sense | | |
| | | Strand | | |
| KHK-1102- | Hs-Mf | 27mer | UCUGCUGACUGGAACCCCAAGUGCUUG | 595 |
| 1140 | commons | Anti-sense | | |
| | | Strand | | |
| KHK-1103- | Hs-Mf | 27mer | CUCUGCUGACUGGAACCCCAAGUGCUU | 596 |
| 1141 | commons | Anti-sense | | |
| | | Strand | | |
| KHK-1104- | Hs-Mf | 27mer | CCUCUGCUGACUGGAACCCCAAGUGCU | 597 |
| 1142 | commons | Anti-sense | | |
| | | Strand | | |
| KHK-1106- | Hs-Mf | 27mer | UUCCUCUGCUGACUGGAACCCCAAGUG | 598 |
| 1144 | commons | Anti-sense | | |
| | | Strand | | |
| KHK-1107- | Hs-Mf | 27mer | CUUCCUCUGCUGACUGGAACCCCAAGU | 599 |
| 1145 | commons | Anti-sense | | |
| | | Strand | | |
| KHK-1135- | Hs-Mf | 27mer | CUCACACGACCAUACAAGCCCCUCAAG | 600 |
| 1173 | commons | Anti-sense | | |
| | | Strand | | |
| KHK-1136- | Hs-Mf | 27mer | CCUCACACGACCAUACAAGCCCCUCAA | 601 |
| ll74 | commons | Anti-sense | | |
| | | Strand | | |
| KHK-1137- | Hs-Mf | 27mer | UCCUCACACGACCAUACAAGCCCCUCA | 602 |
| 1175 | commons | Anti-sense | | |
| | | Strand | | |
| KHK-1138- | Hs-Mf | 27mer | UUCCUCACACGACCAUACAAGCCCCUC | 603 |
| 1176 | commons | Anti-sense | | |
| | | Strand | | |
| KHK-1139- | Hs-Mf | 27mer | UUUCCUCACACGACCAUACAAGCCCCU | 604 |
| 1177 | commons | Anti-sense | | |
| | | Strand | | |
| KHK-1140- | Hs-Mf | 27mer | CUUUCCUCACACGACCAUACAAGCCCC | 605 |
| 1178 | commons | Anti-sense | | |
| | | Strand | | |
| KHK-1141- | Hs-Mf | 27mer | CCUUUCCUCACACGACCAUACAAGCCC | 606 |
| 1179 | commons | Anti-sense | | |
| | | Strand | | |
| KHK-1142- | Hs-Mf | 27mer | CCCUUUCCUCACACGACCAUACAAGCC | 607 |
| 1180 | commons | Anti-sense | | |
| | | Strand | | |
| KHK-1143- | Hs-Mf | 27mer | CCCCUUUCCUCACACGACCAUACAAGC | 608 |
| 1181 | commons | Anti-sense | | |
| | | Strand | | |
| KHK-1144- | Hs-Mf | 27mer | GCCCCUUUCCUCACACGACCAUACAAG | 609 |
| 1182 | commons | Anti-sense | | |
| | | Strand | | |
| KHK-1145- | Hs-Mf | 27mer | AGCCCCUUUCCUCACACGACCAUACAA | 610 |
| 1183 | commons | Anti-sense | | |
| | | Strand | | |
| KHK-1146- | Hs-Mf | 27mer | CAGCCCCUUUCCUCACACGACCAUACA | 611 |
| 1184 | commons | Anti-sense | | |
| | | Strand | | |
| KHK-1147- | Hs-Mf | 27mer | ACAGCCCCUUUCCUCACACGACCAUAC | 612 |
| 1185 | commons | Anti-sense | | |
| | | Strand | | |
| KHK-1148- | Hs-Mf | 27mer | CACAGCCCCUUUCCUCACACGACCAUA | 613 |
| 1186 | commons | Anti-sense | | |
| | | Strand | | |
| KHK-1149- | Hs-Mf | 27mer | GCACAGCCCCUUUCCUCACACGACCAU | 614 |
| 1187 | commons | Anti-sense | | |
| | | Strand | | |
| KHK-1153- | Hs-Mf | 27mer | ACAAGCACAGCCCCUUUCCUCACACGA | 615 |
| 1191 | commons | Anti-sense | | |
| | | Strand | | |
| KHK-1154- | Hs-Mf | 27mer | GACAAGCACAGCCCCUUUCCUCACACG | 616 |
| 1192 | commons | Anti-sense | | |
| | | Strand | | |
| KHK-1157- | Hs-Mf | 27mer | ACAGACAAGCACAGCCCCUUUCCUCAC | 617 |
| 1195 | commons | Anti-sense | | |
| | | Strand | | |
| KHK-1158- | Hs-Mf | 27mer | CACAGACAAGCACAGCCCCUUUCCUCA | 618 |
| 1196 | commons | Anti-sense | | |
| | | Strand | | |
| KHK-1159- | Hs-Mf | 27mer | GCACAGACAAGCACAGCCCCUUUCCUC | 619 |
| 1197 | commons | Anti-sense | | |
| | | Strand | | |
| KHK-1161- | Hs-Mf | 27mer | AGGCACAGACAAGCACAGCCCCUUUCC | 620 |
| 1199 | commons | Anti-sense | | |
| | | Strand | | |
| KHK-1163- | Hs-Mf | 27mer | CCAGGCACAGACAAGCACAGCCCCUUU | 621 |
| 1201 | commons | Anti-sense | | |
| | | Strand | | |
| KHK-1164- | Hs-Mf | 27mer | CCCAGGCACAGACAAGCACAGCCCCUU | 622 |
| 1202 | commons | Anti-sense | | |
| | | Strand | | |
| KHK-1232- | Hs-Mf | 27mer | GGGUGGCGGGAAAGCAUCCGAGUGGAG | 623 |
| 1270 | commons | Anti-sense | | |
| | | Strand | | |
| KHK-1278- | Hs-Mf- | 27mer | CGGAGGCAUUGAAGGUGUCUCCAGCUC | 624 |
| 1316-1147- | Mm-Rn | Anti-sense | | |
| 989 | commons | Strand | | |
| KHK-1279- | Hs-Mf- | 27mer | ACGGAGGCAUUGAAGGUGUCUCCAGCU | 625 |
| 1317-1148- | Mm-Rn | Anti-sense | | |
| 990 | commons | Strand | | |
| KHK-1280- | Hs-Mf- | 27mer | GACGGAGGCAUUGAAGGUGUCUCCAGC | 626 |
| 1318-1149- | Mm-Rn | Anti-sense | | |
| 991 | commons | Strand | | |
| KHK-1281- | Hs-Mf- | 27mer | UGACGGAGGCAUUGAAGGUGUCUCCAG | 627 |
| 1319-1150- | Mm-Rn | Anti-sense | | |
| 992 | commons | Strand | | |
| KHK-1282- | Hs-Mf- | 27mer | AUGACGGAGGCAUUGAAGGUGUCUCCA | 628 |
| 1320-1151- | Mm-Rn | Anti-sense | | |
| 993 | commons | Strand | | |
| KHK-1283- | Hs-Mf | 27mer | GAUGACGGAGGCAUUGAAGGUGUCUCC | 629 |
| 1321 | commons | Anti-sense | | |
| | | Strand | | |
| KHK-1284- | Hs-Mf | 27mer | AGAUGACGGAGGCAUUGAAGGUGUCUC | 630 |
| 1322 | commons | Anti-sense | | |
| | | Strand | | |
| KHK-1285- | Hs-Mf | 27mer | AAGAUGACGGAGGCAUUGAAGGUGUCU | 631 |
| 1323 | commons | Anti-sense | | |
| | | Strand | | |
| KHK-1286- | Hs-Mf | 27mer | GAAGAUGACGGAGGCAUUGAAGGUGUC | 632 |
| 1324 | commons | Anti-sense | | |
| | | Strand | | |
| KHK-1287- | Hs-Mf | 27mer | UGAAGAUGACGGAGGCAUUGAAGGUGU | 633 |
| 1325 | commons | Anti-sense | | |
| | | Strand | | |
| KHK-1288- | Hs-Mf | 27mer | CUGAAGAUGACGGAGGCAUUGAAGGUG | 634 |
| 1326 | commons | Anti-sense | | |
| | | Strand | | |
| KHK-1289- | Hs-Mf | 27mer | GCUGAAGAUGACGGAGGCAUUGAAGGU | 635 |
| 1327 | commons | Anti-sense | | |
| | | Strand | | |
| KHK-1290- | Hs-Mf | 27mer | GGCUGAAGAUGACGGAGGCAUUGAAGG | 636 |
| 1328 | commons | Anti-sense | | |
| | | Strand | | |
| KHK-1291- | Hs-Mf | 27mer | AGGCUGAAGAUGACGGAGGCAUUGAAG | 637 |
| 1329 | commons | Anti-sense | | |
| | | Strand | | |
| KHK-1292- | Hs-Mf | 27mer | GAGGCUGAAGAUGACGGAGGCAUUGAA | 638 |
| 1330 | commons | Anti-sense | | |
| | | Strand | | |
| KHK-1293- | Hs-Mf | 27mer | AGAGGCUGAAGAUGACGGAGGCAUUGA | 639 |
| 1331 | commons | Anti-sense | | |
| | | Strand | | |
| KHK-1294- | Hs-Mf | 27mer | GAGAGGCUGAAGAUGACGGAGGCAUUG | 640 |
| 1332 | commons | Anti-sense | | |
| | | Strand | | |
| KHK-1295- | Hs-Mf | 27mer | GGAGAGGCUGAAGAUGACGGAGGCAUU | 641 |
| 1333 | commons | Anti-sense | | |
| | | Strand | | |
| KHK-1297- | Hs-Mf | 27mer | UGGGAGAGGCUGAAGAUGACGGAGGCA | 642 |
| 1335 | commons | Anti-sense | | |
| | | Strand | | |
| KHK-1323- | Hs-Mf | 27mer | UCAGUGCUUCCUGCACGCUCCUCCCCU | 643 |
| 1361 | commons | Anti-sense | | |
| | | Strand | | |
| KHK-1325- | Hs-Mf | 27mer | UCUCAGUGCUUCCUGCACGCUCCUCCC | 644 |
| 1363 | commons | Anti-sense | | |
| | | Strand | | |
| KHK-1326- | Hs-Mf | 27mer | AUCUCAGUGCUUCCUGCACGCUCCUCC | 645 |
| 1364 | commons | Anti-sense | | |
| | | Strand | | |
| KHK-1327- | Hs-Mf | 27mer | AAUCUCAGUGCUUCCUGCACGCUCCUC | 646 |
| 1365 | commons | Anti-sense | | |
| | | Strand | | |
| KHK-1328- | Hs-Mf | 27mer | GAAUCUCAGUGCUUCCUGCACGCUCCU | 647 |
| 1366 | commons | Anti-sense | | |
| | | Strand | | |
| KHK-1329- | Hs-Mf | 27mer | CGAAUCUCAGUGCUUCCUGCACGCUCC | 648 |
| 1367 | commons | Anti-sense | | |
| | | Strand | | |
| KHK-1330- | Hs-Mf | 27mer | CCGAAUCUCAGUGCUUCCUGCACGCUC | 649 |
| 1368 | commons | Anti-sense | | |
| | | Strand | | |
| KHK-1331- | Hs-Mf | 27mer | CCCGAAUCUCAGUGCUUCCUGCACGCU | 650 |
| 1369 | commons | Anti-sense | | |
| | | Strand | | |
| KHK-1332- | Hs-Mf | 27mer | ACCCGAAUCUCAGUGCUUCCUGCACGC | 651 |
| 1370 | commons | Anti-sense | | |
| | | Strand | | |
| KHK-1333- | Hs-Mf | 27mer | CACCCGAAUCUCAGUGCUUCCUGCACG | 652 |
| 1371 | commons | Anti-sense | | |
| | | Strand | | |
| KHK-1334- | Hs-Mf | 27mer | GCACCCGAAUCUCAGUGCUUCCUGCAC | 653 |
| 1372 | commons | Anti-sense | | |
| | | Strand | | |
| KHK-1335- | Hs-Mf | 27mer | GGCACCCGAAUCUCAGUGCUUCCUGCA | 654 |
| 1373 | commons | Anti-sense | | |
| | | Strand | | |
| KHK-1336- | Hs-Mf | 27mer | UGGCACCCGAAUCUCAGUGCUUCCUGC | 655 |
| 1374 | commons | Anti-sense | | |
| | | Strand | | |
| KHK-1385- | Hs-Mf | 27mer | UCACACGAUGCCAUCAAAGCCCUGCAG | 656 |
| 1423 | commons | Anti-sense | | |
| | | Strand | | |
| KHK-1387- | Hs-Mf | 27mer | UCUCACACGAUGCCAUCAAAGCCCUGC | 657 |
| 1425 | commons | Anti-sense | | |
| | | Strand | | |
| KHK-1388- | Hs-Mf | 27mer | CUCUCACACGAUGCCAUCAAAGCCCUG | 658 |
| 1426 | commons | Anti-sense | | |
| | | Strand | | |
| KHK-1389- | Hs-Mf | 27mer | GCUCUCACACGAUGCCAUCAAAGCCCU | 659 |
| 1427 | commons | Anti-sense | | |
| | | Strand | | |
| KHK-1538- | Hs-Mf | 27mer | CCUGUGGGGAACACAGGACACAGGCAG | 660 |
| 1588 | commons | Anti-sense | | |
| | | Strand | | |
| KHK-1540- | Hs-Mf | 27mer | UCCCUGUGGGGAACACAGGACACAGGC | 661 |
| 1590 | commons | Anti-sense | | |
| | | Strand | | |
| KHK-1542- | Hs-Mf | 27mer | UCUCCCUGUGGGGAACACAGGACACAG | 662 |
| 1592 | commons | Anti-sense | | |
| | | Strand | | |
| KHK-1665- | Hs-Mf | 27mer | UCGAAGAGUCAGAGCCUCAGGAAUGCC | 663 |
| 1708 | commons | Anti-sense | | |
| | | Strand | | |
| KHK-1666- | Hs-Mf | 27mer | AUCGAAGAGUCAGAGCCUCAGGAAUGC | 664 |
| 1709 | commons | Anti-sense | | |
| | | Strand | | |
| KHK-1667- | Hs-Mf | 27mer | GAUCGAAGAGUCAGAGCCUCAGGAAUG | 665 |
| 1710 | commons | Anti-sense | | |
| | | Strand | | |
| KHK-1707- | Hs-Mf | 27mer | GGCGGAGAGGUUAAUUUGGGGAAUGGA | 666 |
| 1750 | commons | Anti-sense | | |
| | | Strand | | |
| KHK-1708- | Hs-Mf | 27mer | GGGCGGAGAGGUUAAUUUGGGGAAUGG | 667 |
| 1751 | commons | Anti-sense | | |
| | | Strand | | |
| KHK-1709- | Hs-Mf | 27mer | UGGGCGGAGAGGUUAAUUUGGGGAAUG | 668 |
| 1752 | commons | Anti-sense | | |
| | | Strand | | |
| KHK-1869- | Hs-Mf | 27mer | AUAGAGUCUGCACAACGCAGGGCCCCG | 669 |
| 1918 | commons | Anti-sense | | |
| | | Strand | | |
| KHK-1870- | Hs-Mf | 27mer | AAUAGAGUCUGCACAACGCAGGGCCCC | 670 |
| 1919 | commons | Anti-sense | | |
| | | Strand | | |
| KHK-1871- | Hs-Mf | 27mer | GAAUAGAGUCUGCACAACGCAGGGCCC | 671 |
| 1920 | commons | Anti-sense | | |
| | | Strand | | |
| KHK-1872- | Hs-Mf | 27mer | GGAAUAGAGUCUGCACAACGCAGGGCC | 672 |
| 1921 | commons | Anti-sense | | |
| | | Strand | | |
| KHK-1873- | Hs-Mf | 27mer | GGGAAUAGAGUCUGCACAACGCAGGGC | 673 |
| 1922 | commons | Anti-sense | | |
| | | Strand | | |
| KHK-1874- | Hs-Mf | 27mer | UGGGAAUAGAGUCUGCACAACGCAGGG | 674 |
| 1923 | commons | Anti-sense | | |
| | | Strand | | |
| KHK-1875- | Hs-Mf | 27mer | GUGGGAAUAGAGUCUGCACAACGCAGG | 675 |
| 1924 | commons | Anti-sense | | |
| | | Strand | | |
| KHK-1876- | Hs-Mf | 27mer | UGUGGGAAUAGAGUCUGCACAACGCAG | 676 |
| 1925 | commons | Anti-sense | | |
| | | Strand | | |
| KHK-1877- | Hs-Mf | 27mer | CUGUGGGAAUAGAGUCUGCACAACGCA | 677 |
| 1926 | commons | Anti-sense | | |
| | | Strand | | |
| KHK-1878- | Hs-Mf | 27mer | GCUGUGGGAAUAGAGUCUGCACAACGC | 678 |
| 1927 | commons | Anti-sense | | |
| | | Strand | | |
| KHK-1879- | Hs-Mf | 27mer | AGCUGUGGGAAUAGAGUCUGCACAACG | 679 |
| 1928 | commons | Anti-sense | | |
| | | Strand | | |
| KHK-1880- | Hs-Mf | 27mer | GAGCUGUGGGAAUAGAGUCUGCACAAC | 680 |
| 1929 | commons | Anti-sense | | |
| | | Strand | | |
| KHK-1900- | Hs-Mf | 27mer | GGUGUGGACUCCCAGCUUCUGAGCUGU | 681 |
| 1949 | commons | Anti-sense | | |
| | | Strand | | |
| KHK-1905- | Hs-Mf | 27mer | UCAGCGGUGUGGACUCCCAGCUUCUGA | 682 |
| 1954 | commons | Anti-sense | | |
| | | Strand | | |
| KHK-1971- | Hs-Mf | 27mer | AAUCACAGGCUGGUGGGCAGGGCAGAG | 683 |
| 2025 | commons | Anti-sense | | |
| | | Strand | | |
| KHK-1974- | Hs-Mf | 27mer | UCAAAUCACAGGCUGGUGGGCAGGGCA | 684 |
| 2028 | commons | Anti-sense | | |
| | | Strand | | |
| KHK-1975- | Hs-Mf | 27mer | AUCAAAUCACAGGCUGGUGGGCAGGGC | 685 |
| 2029 | commons | Anti-sense | | |
| | | Strand | | |
| KHK-1976- | Hs-Mf | 27mer | CAUCAAAUCACAGGCUGGUGGGCAGGG | 686 |
| 2030 | commons | Anti-sense | | |
| | | Strand | | |
| KHK-1978- | Hs-Mf | 27mer | CCCAUCAAAUCACAGGCUGGUGGGCAG | 687 |
| 2032 | commons | Anti-sense | | |
| | | Strand | | |
| KHK-1979- | Hs-Mf | 27mer | CCCCAUCAAAUCACAGGCUGGUGGGCA | 688 |
| 2033 | commons | Anti-sense | | |
| | | Strand | | |
| KHK-2032- | Hs-Mf | 27mer | ACUUUCAGGCUCUGGGGCAGUCAGCGG | 689 |
| 2086 | commons | Anti-sense | | |
| | | Strand | | |
| KHK-2035- | Hs-Mf | 27mer | GAGACUUUCAGGCUCUGGGGCAGUCAG | 690 |
| 2089 | commons | Anti-sense | | |
| | | Strand | | |
| KHK-2036- | Hs-Mf | 27mer | UGAGACUUUCAGGCUCUGGGGCAGUCA | 691 |
| 2090 | commons | Anti-sense | | |
| | | Strand | | |
| KHK-2037- | Hs-Mf | 27mer | GUGAGACUUUCAGGCUCUGGGGCAGUC | 692 |
| 2091 | commons | Anti-sense | | |
| | | Strand | | |
| KHK-2038- | Hs-Mf | 27mer | GGUGAGACUUUCAGGCUCUGGGGCAGU | 693 |
| 2092 | commons | Anti-sense | | |
| | | Strand | | |
| KHK-2039- | Hs-Mf | 27mer | GGGUGAGACUUUCAGGCUCUGGGGCAG | 694 |
| 2093 | commons | Anti-sense | | |
| | | Strand | | |
| KHK-2040- | Hs-Mf | 27mer | AGGGUGAGACUUUCAGGCUCUGGGGCA | 695 |
| 2094 | commons | Anti-sense | | |
| | | Strand | | |
| KHK-2041- | Hs-Mf | 27mer | AAGGGUGAGACUUUCAGGCUCUGGGGC | 696 |
| 2095 | commons | Anti-sense | | |
| | | Strand | | |
| KHK-2042- | Hs-Mf | 27mer | CAAGGGUGAGACUUUCAGGCUCUGGGG | 697 |
| 2096 | commons | Anti-sense | | |
| | | Strand | | |
| KHK-2043- | Hs-Mf | 27mer | CCAAGGGUGAGACUUUCAGGCUCUGGG | 698 |
| 2097 | commons | Anti-sense | | |
| | | Strand | | |
| KHK-2044- | Hs-Mf | 27mer | UCCAAGGGUGAGACUUUCAGGCUCUGG | 699 |
| 2098 | commons | Anti-sense | | |
| | | Strand | | |
| KHK-2045- | Hs-Mf | 27mer | CUCCAAGGGUGAGACUUUCAGGCUCUG | 700 |
| 2099 | commons | Anti-sense | | |
| | | Strand | | |
| KHK-2067- | Hs-Mf | 27mer | ACGCCCUUAAUUCCAAGGUGGGCUCCA | 701 |
| 2121 | commons | Anti-sense | | |
| | | Strand | | |
| KHK-2069- | Hs-Mf | 27mer | GCACGCCCUUAAUUCCAAGGUGGGCUC | 702 |
| 2123 | commons | Anti-sense | | |
| | | Strand | | |
| KHK-2091- | Hs-Mf | 27mer | CUGGGUCACAUUUGUGGCUGAGGCACG | 703 |
| 2145 | commons | Anti-sense | | |
| | | Strand | | |
| KHK-2092- | Hs-Mf | 27mer | CCUGGGUCACAUUUGUGGCUGAGGCAC | 704 |
| 2146 | commons | Anti-sense | | |
| | | Strand | | |
| KHK-2093- | Hs-Mf | 27mer | UCCUGGGUCACAUUUGUGGCUGAGGCA | 705 |
| 2147 | commons | Anti-sense | | |
| | | Strand | | |
| KHK-2094- | Hs-Mf | 27mer | AUCCUGGGUCACAUUUGUGGCUGAGGC | 706 |
| 2148 | commons | Anti-sense | | |
| | | Strand | | |
| KHK-2095- | Hs-Mf | 27mer | UAUCCUGGGUCACAUUUGUGGCUGAGG | 707 |
| 2149 | commons | Anti-sense | | |
| | | Strand | | |
| KHK-2096- | Hs-Mf | 27mer | GUAUCCUGGGUCACAUUUGUGGCUGAG | 708 |
| 2150 | commons | Anti-sense | | |
| | | Strand | | |
| KHK-2105 | Hs | 27mer | CAACACUCUGUAUCCUGGGUCACAUUU | 709 |
| | unique | Anti-sense | | |
| | | Strand | | |
| KHK-2148- | Hs-Mf | 27mer | CCAAUUCCAAUAUGUGUUCCAGAUCGG | 710 |
| 2197 | commons | Anti-sense | | |
| | | Strand | | |
| KHK-2149- | Hs-Mf | 27mer | CCCAAUUCCAAUAUGUGUUCCAGAUCG | 711 |
| 2198 | commons | Anti-sense | | |
| | | Strand | | |
| KHK-2150- | Hs-Mf | 27mer | CCCCAAUUCCAAUAUGUGUUCCAGAUC | 712 |
| 2199 | commons | Anti-sense | | |
| | | Strand | | |
| KHK-2151- | Hs-Mf | 27mer | GCCCCAAUUCCAAUAUGUGUUCCAGAU | 713 |
| 2200 | commons | Anti-sense | | |
| | | Strand | | |
| KHK-2152- | Hs-Mf | 27mer | GGCCCCAAUUCCAAUAUGUGUUCCAGA | 714 |
| 2201 | commons | Anti-sense | | |
| | | Strand | | |
| KHK-2153- | Hs-Mf | 27mer | UGGCCCCAAUUCCAAUAUGUGUUCCAG | 715 |
| 2202 | commons | Anti-sense | | |
| | | Strand | | |
| KHK-2154- | Hs-Mf | 27mer | UUGGCCCCAAUUCCAAUAUGUGUUCCA | 716 |
| 2203 | commons | Anti-sense | | |
| | | Strand | | |
| KHK-2155- | Hs-Mf | 27mer | GUUGGCCCCAAUUCCAAUAUGUGUUCC | 717 |
| 2204 | commons | Anti-sense | | |
| | | Strand | | |
| KHK-2156- | Hs-Mf | 27mer | AGUUGGCCCCAAUUCCAAUAUGUGUUC | 718 |
| 2205 | commons | Anti-sense | | |
| | | Strand | | |
| KHK-2157- | Hs-Mf | 27mer | GAGUUGGCCCCAAUUCCAAUAUGUGUU | 719 |
| 2206 | commons | Anti-sense | | |
| | | Strand | | |
| KHK-2159- | Hs-Mf | 27mer | UGGAGUUGGCCCCAAUUCCAAUAUGUG | 720 |
| 2208 | commons | Anti-sense | | |
| | | Strand | | |
| KHK-2160- | Hs-Mf | 27mer | UUGGAGUUGGCCCCAAUUCCAAUAUGU | 721 |
| 2209 | commons | Anti-sense | | |
| | | Strand | | |
| KHK-2161- | Hs-Mf | 27mer | AUUGGAGUUGGCCCCAAUUCCAAUAUG | 722 |
| 2210 | commons | Anti-sense | | |
| | | Strand | | |
| KHK-2162- | Hs-Mf | 27mer | UAUUGGAGUUGGCCCCAAUUCCAAUAU | 723 |
| 2211 | commons | Anti-sense | | |
| | | Strand | | |
| KHK-2163- | Hs-Mf | 27mer | AUAUUGGAGUUGGCCCCAAUUCCAAUA | 724 |
| 2212 | commons | Anti-sense | | |
| | | Strand | | |
| KHK-2164- | Hs-Mf | 27mer | UAUAUUGGAGUUGGCCCCAAUUCCAAU | 725 |
| 2213 | commons | Anti-sense | | |
| | | Strand | | |
| KHK-2165- | Hs-Mf | 27mer | CUAUAUUGGAGUUGGCCCCAAUUCCAA | 726 |
| 2214 | commons | Anti-sense | | |
| | | Strand | | |
| KHK-2166- | Hs-Mf | 27mer | CCUAUAUUGGAGUUGGCCCCAAUUCCA | 727 |
| 2215 | commons | Anti-sense | | |
| | | Strand | | |
| KHK-2170- | Hs-Mf | 27mer | CCACCCUAUAUUGGAGUUGGCCCCAAU | 728 |
| 2219 | commons | Anti-sense | | |
| | | Strand | | |
| KHK-2196- | Hs-Mf | 27mer | AUGCUCUUUACAUUAUAAGGCCUUACC | 729 |
| 2245 | commons | Anti-sense | | |
| | | Strand | | |
| KHK-2197- | Hs-Mf | 27mer | UAUGCUCUUUACAUUAUAAGGCCUUAC | 730 |
| 2246 | commons | Anti-sense | | |
| | | Strand | | |
| KHK-2198- | Hs-Mf | 27mer | AUAUGCUCUUUACAUUAUAAGGCCUUA | 731 |
| 2247 | commons | Anti-sense | | |
| | | Strand | | |
| KHK-2199- | Hs-Mf | 27mer | UAUAUGCUCUUUACAUUAUAAGGCCUU | 732 |
| 2248 | commons | Anti-sense | | |
| | | Strand | | |
| KHK-2200- | Hs-Mf | 27mer | UUAUAUGCUCUUUACAUUAUAAGGCCU | 733 |
| 2249 | commons | Anti-sense | | |
| | | Strand | | |
| KHK-2201- | Hs-Mf | 27mer | AUUAUAUGCUCUUUACAUUAUAAGGCC | 734 |
| 2250 | commons | Anti-sense | | |
| | | Strand | | |
| KHK-2205 | Hs | 27mer | UUACAUUAUAUGCUCUUUACAUUAUAA | 735 |
| | unique | Anti-sense | | |
| | | Strand | | |
| KHK-2238 | Hs | 27mer | UUUUAAUCCAGGUCUGUCUCACUCUAA | 736 |
| | unique | Anti-sense | | |
| | | Strand | | |
| KHK-2260- | Hs-Mf | 27mer | AUGCAGCUAAUUAAAUGGCAGAUUUUA | 737 |
| 2309 | commons | Anti-sense | | |
| | | Strand | | |
| KHK-2261- | Hs-Mf | 27mer | UAUGCAGCUAAUUAAAUGGCAGAUUUU | 738 |
| 2310 | commons | Anti-sense | | |
| | | Strand | | |
| KHK-2262- | Hs-Mf | 27mer | AUAUGCAGCUAAUUAAAUGGCAGAUUU | 739 |
| 2311 | commons | Anti-sense | | |
| | | Strand | | |
| KHK-2263- | Hs-Mf | 27mer | GAUAUGCAGCUAAUUAAAUGGCAGAUU | 740 |
| 2312 | commons | Anti-sense | | |
| | | Strand | | |
| KHK-2264- | Hs-Mf | 27mer | UGAUAUGCAGCUAAUUAAAUGGCAGAU | 741 |
| 2313 | commons | Anti-sense | | |
| | | Strand | | |
| KHK-2265- | Hs-Mf | 27mer | GUGAUAUGCAGCUAAUUAAAUGGCAGA | 742 |
| 2314 | commons | Anti-sense | | |
| | | Strand | | |
| KHK-2266- | Hs-Mf | 27mer | GGUGAUAUGCAGCUAAUUAAAUGGCAG | 743 |
| 2315 | commons | Anti-sense | | |
| | | Strand | | |
| KHK-2299 | Hs | 27mer | UUGAGGCAGAUUGCGUUAAGUGCUGUA | 744 |
| | unique | Anti-sense | | |
| | | Strand | | |
| KHK-2317- | Hs-Mf | 27mer | AUUUGACAGAUGAAGAAAUUGAGGCAG | 745 |
| 2366 | commons | Anti-sense | | |
| | | Strand | | |
| KHK-2318- | Hs-Mf | 27mer | CAUUUGACAGAUGAAGAAAUUGAGGCA | 746 |
| 2367 | commons | Anti-sense | | |
| | | Strand | | |
| KHK-2319- | Hs-Mf | 27mer | CCAUUUGACAGAUGAAGAAAUUGAGGC | 747 |
| 2368 | commons | Anti-sense | | |
| | | Strand | | |
| KHK-2320- | Hs-Mf | 27mer | UCCAUUUGACAGAUGAAGAAAUUGAGG | 748 |
| 2369 | commons | Anti-sense | | |
| | | Strand | | |
| KHK-2321- | Hs-Mf | 27mer | UUCCAUUUGACAGAUGAAGAAAUUGAG | 749 |
| 2370 | commons | Anti-sense | | |
| | | Strand | | |
| KHK-2322- | Hs-Mf | 27mer | GUUCCAUUUGACAGAUGAAGAAAUUGA | 750 |
| 2371 | commons | Anti-sense | | |
| | | Strand | | |
| KHK-2323- | Hs-Mf | 27mer | GGUUCCAUUUGACAGAUGAAGAAAUUG | 751 |
| 2372 | commons | Anti-sense | | |
| | | Strand | | |
| KHK-2324- | Hs-Mf | 27mer | UGGUUCCAUUUGACAGAUGAAGAAAUU | 752 |
| 2373 | commons | Anti-sense | | |
| | | Strand | | |
| KHK-2325- | Hs-Mf | 27mer | UUGGUUCCAUUUGACAGAUGAAGAAAU | 753 |
| 2374 | commons | Anti-sense | | |
| | | Strand | | |
| KHK-2326- | Hs-Mf | 27mer | AUUGGUUCCAUUUGACAGAUGAAGAAA | 754 |
| 2375 | commons | Anti-sense | | |
| | | Strand | | |
| KHK-2332 | Hs | 27mer | AGCAGAAUUGGUUCCAUUUGACAGAUG | 755 |
| | unique | Anti-sense | | |
| | | Strand | | |
| KHK-2333 | Hs | 27mer | AAGCAGAAUUGGUUCCAUUUGACAGAU | 756 |
| | unique | Anti-sense | | |
| | | Strand | | |
| KHK-2335 | Hs | 27mer | CCAAGCAGAAUUGGUUCCAUUUGACAG | 757 |
| | unique | Anti-sense | | |
| | | Strand | | |
| KHK-2340 | Hs | 27mer | UGUAGCCAAGCAGAAUUGGUUCCAUUU | 758 |
| | unique | Anti-sense | | |
| | | Strand | | |
| KHK-2341 | Hs | 27mer | CUGUAGCCAAGCAGAAUUGGUUCCAUU | 759 |
| | unique | Anti-sense | | |
| | | Strand | | |
| KHK-2346 | Hs | 27mer | UAAUUCUGUAGCCAAGCAGAAUUGGUU | 760 |
| | unique | Anti-sense | | |
| | | Strand | | |
| KHK-2352 | Hs | 27mer | UCACAAUAAUUCUGUAGCCAAGCAGAA | 761 |
| | unique | Anti-sense | | |
| | | Strand | | |
| KHK-2358 | Hs | 27mer | UUAUCCUCACAAUAAUUCUGUAGCCAA | 762 |
| | unique | Anti-sense | | |
| | | Strand | | |
| KHK-2359 | Hs | 27mer | UUUAUCCUCACAAUAAUUCUGUAGCCA | 763 |
| | unique | Anti-sense | | |
| | | Strand | | |
| KHK-2360 | Hs | 27mer | UUUUAUCCUCACAAUAAUUCUGUAGCC | 764 |
| | unique | Anti-sense | | |
| | | Strand | | |
| KHK-2361 | Hs | 27mer | AUUUUAUCCUCACAAUAAUUCUGUAGC | 765 |
| | unique | Anti-sense | | |
| | | Strand | | |
| KHK-2362 | Hs | 27mer | GAUUUUAUCCUCACAAUAAUUCUGUAG | 766 |
| | unique | Anti-sense | | |
| | | Strand | | |
| KHK-2363 | Hs | 27mer | UGAUUUUAUCCUCACAAUAAUUCUGUA | 767 |
| | unique | Anti-sense | | |
| | | Strand | | |
| KHK-2364 | Hs | 27mer | AUGAUUUUAUCCUCACAAUAAUUCUGU | 768 |
| | unique | Anti-sense | | |
| | | Strand | | |
| KHK-2365 | Hs | 27mer | UAUGAUUUUAUCCUCACAAUAAUUCUG | 769 |
| | unique | Anti-sense | | |
| | | Strand | | |
| KHK-2366 | Hs | 27mer | AUAUGAUUUUAUCCUCACAAUAAUUCU | 770 |
| | unique | Anti-sense | | |
| | | Strand | | |
| KHK-2367 | Hs | 27mer | UAUAUGAUUUUAUCCUCACAAUAAUUC | 771 |
| | unique | Anti-sense | | |
| | | Strand | | |
| Forward | NHP | N/A | TGCCTTCATGGGCTCAATG | 772 |
| Primer | KHK | | | |
| Reverse | NHP | N/A | TCGGCCACCAGGAAGTCA | 773 |
| Primer | KHK | | | |
| KHK-510- | Hs-Mf- | Low-2′- | [mCs][mU][mC][mA][mU][mG][mG][fA] | 774 |
| 548-379- | Mm-Rn | Fluoro | [fA][fG][fA][mG][mA][mA][mG][mC] | |
| 221 | commons | Pattern | [mA][mG][mA][mA][mG][mC][mA][mG] | |
| | | Modified | [mC][mC][mG][ademA-GalNAc][ademA- | |
| | | Sense | GalNAc][ademA-GalNAc][mG][mG][mC] | |
| | | Strand | [mU][mG][mC] | |
| KHK-516- | Hs-Mf- | Low-2′- | [mGs][mA][mA][mG][mA][mG][mA][fA] | 775 |
| 554-385- | Mm-Rn | Fluoro | [fG][fC][fA][mG][mA][mU][mC][mC] | |
| 227 | commons | Pattern | [mU][mG][mU][mA][mG][mC][mA][mG] | |
| | | Modified | [mC][mC][mG][ademA-GalNAc][ademA- | |
| | | Sense | GalNAc][ademA-GalNAc][mG][mG][mC] | |
| | | Strand | [mU][mG][mC] | |
| KHK-829- | Hs-Mf | Low-2′- | [mGs][mC][mA][mA][mC][mC][mG][fU] | 776 |
| 838 | commons | Fluoro | [fA][fC][fC][mA][mU][mU][mG][mU] | |
| | | Pattern | [mG][mC][mU][mA][mG][mC][mA][mG] | |
| | | Modified | [mC][mC][mG][ademA-GalNAc][ademA- | |
| | | Sense | GalNAc][ademA-GalNAc][mG][mG][mC] | |
| | | Strand | [mU][mG][mC] | |
| KHK-860- | Hs-Mf- | Low-2′- | [mCs][mC][mU][mG][mC][mC][mA][fG] | 777 |
| 898-729- | Mm-Rn | Fluoro | [fA][fU][fG][mU][mG][mU][mC][mU] | |
| 571 | commons | Pattern | [mG][mC][mU][mA][mG][mC][mA][mG] | |
| | | Modified | [mC][mC][mG][ademA-GalNAc][ademA- | |
| | | Sense | GalNAc][ademA-GalNAc][mG][mG][mC] | |
| | | Strand | [mU][mG][mC] | |
| KHK-861- | Hs-Mf- | Low-2′- | [mCs][mU][mG][mC][mC][mA][mG][fA] | 778 |
| 899-730- | Mm-Rn | Fluoro | [fU][fG][fU][mG][mU][mC][mU][mG] | |
| 572 | commons | Pattern | [mC][mU][mA][mA][mG][mC][mA][mG] | |
| | | Modified | [mC][mC][mG][ademA-GalNAc][ademA- | |
| | | Sense | GalNAc][ademA-GalNAc][mG][mG][mC] | |
| | | Strand | [mU][mG][mC] | |
| KHK-865 | Hs | Low-2′- | [mCs][mA][mG][mA][mU][mG][mU][fG] | 779 |
| | unique | Fluoro | [fU][fC][fU][mG][mC][mU][mA][mC] | |
| | | Pattern | [mA][mG][mA][mA][mG][mC][mA][mG] | |
| | | Modified | [mC][mC][mG][ademA-GalNAc][ademA- | |
| | | Sense | GalNAc][ademA-GalNAc][mG][mG][mC] | |
| | | Strand | [mU][mG][mC] | |
| KHK-882- | Hs-Mf | Low-2′- | [mGs][mA][mC][mU][mU][mU][mG][fA] | 780 |
| 920 | commons | Fluoro | [fG][fA][fA][mG][mG][mU][mU][mG] | |
| | | Pattern | [mA][mU][mC][mA][mG][mC][mA][mG] | |
| | | Modified | [mC][mC][mG][ademA-GalNAc][ademA- | |
| | | Sense | GalNAc][ademA-GalNAc][mG][mG][mC] | |
| | | Strand | [mU][mG][mC] | |
| KHK-883- | Hs-Mf | Low-2′- | [mAs][mC][mU][mU][mU][mG][mA][fG] | 781 |
| 921 | commons | Fluoro | [fA][fA][fG][mG][mU][mU][mG][mA] | |
| | | Pattern | [mU][mC][mU][mA][mG][mC][mA][mG] | |
| | | Modified | [mC][mC][mG][ademA-GalNAc][ademA- | |
| | | Sense | GalNAc][ademA-GalNAc][mG][mG][mC] | |
| | | Strand | [mU][mG][mC] | |
| KHK-885- | Hs-Mf | Low-2′- | [mUs][mU][mU][mG][mA][mG][mA][fA] | 782 |
| 923 | commons | Fluoro | [fG][fG][fU][mU][mG][mA][mU][mC] | |
| | | Pattern | [mU][mG][mA][mA][mG][mC][mA][mG] | |
| | | Modified | [mC][mC][mG][ademA-GalNAc][ademA- | |
| | | Sense | GalNAc][ademA-GalNAc][mG][mG][mC] | |
| | | Strand | [mU][mG][mC] | |
| KHK-1054- | Hs-Mf | Low-2′- | [mAs][mG][fC][mU][mG][mU][mU][fU] | 783 |
| 1092 | commons | Fluoro | [fG][fG][m][fU][fA][mC][mG][mG] | |
| | | Pattern | C[fA][mG][mA][mA][mG][mC][mA][mG] | |
| | | Modified | [mC][mC][mG][ademA-GalNAc][ademA- | |
| | | Sense | GalNAc][ademA-GalNAc][mG][mG][mC] | |
| | | Strand | [mU][mG][mC] | |
| KHK-1075- | Hs-Mf- | Low-2′- | [mUs][mG][mG][mU][mG][mU][mU][fU] | 784 |
| 1113-944- | Mm-Rn | Fluoro | [fG][fU][fC][mA][mG][mC][mA][mA] | |
| 786 | commons | Pattern | [mA][mG][mA][mA][mG][mC][mA][mG] | |
| | | Modified | [mC][mC][mG][ademA-GalNAc][ademA- | |
| | | Sense | GalNAc][ademA-GalNAc][mG][mG][mC] | |
| | | Strand | [mU][mG][mC] | |
| KHK-1078- | Hs-Mf- | Low-2′- | [mUs][mG][mU][mU][mU][mG][mU][fC] | 785 |
| 1116-947- | Mm-Rn | Fluoro | [fA][fG][fC][mA][mA][mA][mG][mA] | |
| 789 | commons | Pattern | [mU][mG][mU][mA][mG][mC][mA][mG] | |
| | | Modified | [mC][mC][mG][ademA-GalNAc][ademA- | |
| | | Sense | GalNAc][ademA-GalNAc][mG][mG][mC] | |
| | | Strand | [mU][mG][mC] | |
| KHK-1281- | Hs-Mf- | Low-2′- | [mGs][mG][mA][mG][mA][mC][mA][fC] | 786 |
| 1319-1150- | Mm-Rn | Fluoro | [fC][fU][fU][mC][mA][mA][mU][mG] | |
| 992 | commons | Pattern | [mC][mC][mU][mA][mG][mC][mA][mG] | |
| | | Modified | [mC][mC][mG][ademA-GalNAc][ademA- | |
| | | Sense | GalNAc][ademA-GalNAc][mG][mG][mC] | |
| | | Strand | [mU][mG][mC] | |
| KHK-1288- | Hs-Mf | Low-2′- | [mCs][mC][mU][mU][mC][mA][mA][fU] | 787 |
| 1326 | commons | Fluoro | [fG][fC][fC][mU][mC][mC][mG][mU] | |
| | | Pattern | [mC][mA][mU][mA][mG][mC][mA][mG] | |
| | | Modified | [mC][mC][mG][ademA-GalNAc][ademA- | |
| | | Sense | GalNAc][ademA-GalNAc][mG][mG][mC] | |
| | | Strand | [mU][mG][mC] | |
| KHK-1290- | Hs-Mf | Low-2′- | [mUs][mU][mC][mA][mA][mU][mG][fC] | 788 |
| 1328 | commons | Fluoro | [fC][fU][fC][mC][mG][mU][mC][mA] | |
| | | Pattern | [mU][mC][mU][mA][mG][mC][mA][mG] | |
| | | Modified | [mC][mC][mG][ademA-GalNAc][ademA- | |
| | | Sense | GalNAc][ademA-GalNAc][mG][mG][mC] | |
| | | Strand | [mU][mG][mC] | |
| KHK-1148- | Hs-Mf | Low-2′- | [mUs][mG][mG][mU][mC][mG][mU][fG] | 789 |
| 1186 | commons | Fluoro | [fU][fG][fA][mG][mG][mA][mA][mA] | |
| | | Pattern | [mG][mG][mG][mA][mG][mC][mA][mG] | |
| | | Modified | [mC][mC][mG][ademA-GalNAc][ademA- | |
| | | Sense | GalNAc][ademA-GalNAc][mG][mG][mC] | |
| | | Strand | [mU][mG][mC] | |
| KHK-1152- | Hs-Mf | Low-2′- | [mCs][mG][mU][mG][mU][mG][mA][fG] | 790 |
| 1190 | commons | Fluoro | [fG][fA][fA][mA][mG][mG][mG][mG] | |
| | | Pattern | [mC][mU][mG][mA][mG][mC][mA][mG] | |
| | | Modified | [mC][mC][mG][ademA-GalNAc][ademA- | |
| | | Sense | GalNAc][ademA-GalNAc][mG][mG][mC] | |
| | | Strand | [mU][mG][mC] | |
| KHK-1154- | Hs-Mf | Low-2′- | [mUs][mG][mU][mG][mA][mG][mG][fA] | 791 |
| 1192 | commons | Fluoro | [fA][fA][fG][mG][mG][mG][mC][mU] | |
| | | Pattern | [mG][mU][mG][mA][mG][mC][mA][mG] | |
| | | Modified | [mC][mC][mG][ademA-GalNAc][ademA- | |
| | | Sense | GalNAc][ademA-GalNAc][mG][mG][mC] | |
| | | Strand | [mU][mG][mC] | |
| KHK-1155- | Hs-Mf | Low-2′- | [mGs][mU][mG][mA][mG][mG][mA][fA] | 792 |
| 1193 | commons | Fluoro | [fA][fG][fG][mG][mG][mC][mU][mG] | |
| | | Pattern | [mU][mG][mC][mA][mG][mC][mA][mG] | |
| | | Modified | [mC][mC][mG][ademA-GalNAc][ademA- | |
| | | Sense | GalNAc][ademA-GalNAc][mG][mG][mC] | |
| | | Strand | [mU][mG][mC] | |
| KHK-1277 | Hs | Low-2′- | [mAs][mG][mC][mU][mG][mG][mA][fG] | 793 |
| | unique | Fluoro | [fA][fC][fA][mC][mC][mU][mU][mC] | |
| | | Pattern | [mA][mA][mU][mA][mG][mC][mA][mG] | |
| | | Modified | [mC][mC][mG][ademA-GalNAc][ademA- | |
| | | Sense | GalNAc][ademA-GalNAc][mG][mG][mC] | |
| | | Strand | [mU][mG][mC] | |
| KHK-1147- | Hs-Mf | Low-2′- | [mAs][mU][mG][mG][mU][mC][mG][fU] | 794 |
| 1185 | commons | Fluoro | [fG][fU][fG][mA][mG][mG][mA][mA] | |
| | | Pattern | [mA][mG][mG][mA][G][mC][mA][mG] | |
| | | Modified | m[mC][mC][mG][ademA-GalNAc][ademA- | |
| | | Sense | GalNAc][ademA-GalNAc][mG][mG][mC] | |
| | | Strand | [mU][mG][mC] | |
| KHK-869- | Hs-Mf | Low-2′- | [mUs][mG][mU][mG][mU][mC][mU][fG] | 795 |
| 934 | commons | Fluoro | [fC][fU][fA][mC][mA][mG][mA][mC] | |
| | | Pattern | [mU][mU][mU][mA][mG][mC][mA][mG] | |
| | | Modified | [mC][mC][mG][ademA-GalNAc][ademA- | |
| | | Sense | GalNAc][ademA-alNAc][mG][mG][mC] | |
| | | Strand | G[mU][mG][mC] | |
| KHK-873 | Hs | Low-2′- | [mUs][mC][mU][mG][mC][mU][mA][fC] | 796 |
| | unique | Fluoro | [fA][fG][fA][mC][mU][mU][mU][mG] | |
| | | Pattern | [mA][mG][mA][mA][mG][mC][mA][mG] | |
| | | Modified | [mC][mC][mG][ademA-GalNAc][ademA- | |
| | | Sense | GalNAc][ademA-GalNAc][mG][mG][mC] | |
| | | Strand | [mU][mG][mC] | |
| KHK-879 | Hs | Low-2′- | [mAs][mC][mA][mG][mA][mC][mU][fU] | 797 |
| | unique | Fluoro | [fU][fG][fA][mG][mA][mA][mG][mG] | |
| | | Pattern | [mU][mU][mG][mA][mG][mC][mA][mG] | |
| | | Modified | [mC][mC][mG][ademA-GalNAc][ademA- | |
| | | Sense | GalNAc][ademA-GalNAc][mG][mG][mC] | |
| | | Strand | [mU][mG][mC] | |
| KHK-881 | Hs | Low-2′- | [mAs][mG][mA][mC][mU][mU][mU][fG] | 798 |
| | unique | Fluoro | [fA][fG][fA][mA][mG][mG][mU][mU] | |
| | | Pattern | [mG][mA][mU][mA][mG][mC][mA][mG] | |
| | | Modified | [mC][mC][mG][ademA-GalNAc][ademA- | |
| | | Sense | GalNAc][ademA-GalNAc][mG][mG][mC] | |
| | | Strand | [mU][mG][mC] | |
| KHK-896- | Hs-Mf | Low-2′- | [mUs][mG][mA][mU][mC][mU][mG][fA] | 799 |
| 934 | commons | Fluoro | [fC][fC][fC][mA][mG][mU][mU][mC] | |
| | | Pattern | [mA][mA][mG][mA][mG][mC][mA][mG] | |
| | | Modified | [mC][mC][mG][ademA-GalNAc][ademA- | |
| | | Sense | GalNAc][ademA-GalNAc][mG][mG][mC] | |
| | | Strand | [mU][mG][mC] | |
| KHK-1064- | Hs-Mf | Low-2′- | [mCs][mU][mA][mC][mG][mG][mA][fG] | 800 |
| 1102 | commons | Fluoro | [fA][fC][fG][mU][mG][mG][mU][mG] | |
| | | Pattern | [mU][mU][mU][mA][mG][mC][mA][mG] | |
| | | Modified | [mC][mC][mG][ademA-GalNAc][ademA- | |
| | | Sense | GalNAc][ademA-GalNAc][mG][mG][mC] | |
| | | Strand | [mU][mG][mC] | |
| KHK-1077- | Hs-Mf- | Low-2′- | [mGs][mU][mG][mU][mU][mU][mG][fU] | 801 |
| 1115-946- | Mm-Rn | Fluoro | [fC][fA][fG][mC][mA][mA][mA][mG] | |
| 788 | commons | Pattern | [mA][mU][mG][mA][mG][mC][mA][mG] | |
| | | Modified | [mC][mC][mG][ademA-GalNAc][ademA- | |
| | | Sense | GalNAc][ademA-GalNAc][mG][mG][mC] | |
| | | Strand | [mU][mG][mC] | |
| KHK-1080- | Hs-Mf- | Low-2′- | [mUs][mU][mU][mG][mU][mC][mA][fG] | 802 |
| 1118-949- | Mm-Rn | Fluoro | [fC][fA][fA][mA][mG][mA][mU][mG] | |
| 791 | commons | Pattern | [mU][mG][mG][mA][mG][mC][mA][mG] | |
| | | Modified | [mC][mC][mG][ademA-GalNAc][ademA- | |
| | | Sense | GalNAc][ademA-alNAc][mG][mG][mC] | |
| | | Strand | G[mU][mG][mC] | |
| KHK-1106- | Hs-Mf | Low-2′- | [mCs][mU][mU][mG][mG][mG][mG][fU] | 803 |
| 1144 | commons | Fluoro | [fU][fC][fC][mA][mG][mU][mC][mA] | |
| | | Pattern | [mG][mC][mA][mA][mG][mC][mA][mG] | |
| | | Modified | [mC][mC][mG][ademA-GalNAc][ademA- | |
| | | Sense | GalNAc][ademA-GalNAc][mG][mG][mC] | |
| | | Strand | [mU][mG][mC] | |
| KHK-1334- | Hs-Mf | Low-2′- | [mGs][mC][mA][mG][mG][mA][mA][fG] | 804 |
| 1372 | commons | Fluoro | [fC][fA][fC][mU][mG][mA][mG][mA] | |
| | | Pattern | [mU][mU][mC][mA][mG][mC][mA][mG] | |
| | | Modified | [mC][mC][mG][ademA-GalNAc][ademA- | |
| | | Sense | GalNAc][ademA-GalNAc][mG][mG][mC] | |
| | | Strand | [mU][mG][mC] | |
| KHK-516- | Hs-Mf- | Med-2′- | [mGs][mA][fA][mG][mA][mG][mA][fA] | 805 |
| 554-385- | Mm-Rn | Fluoro | [fG][fC][mA][fG][fA][mU][mC][mC] | |
| 227 | commons | Pattern | [fU][mG][mU][mA][mG][mC][mA][mG] | |
| | | Modified | [mC][mC][mG][ademA-GalNAc][ademA- | |
| | | Sense | GalNAc][ademA-GalNAc][mG][mG][mC] | |
| | | Strand | [mU][mG][mC] | |
| KHK-804 | Hs | Med-2′- | [mUs][mG][fC][mU][mG][mC][mA][fU] | 806 |
| | unique | Fluoro | [fC][fA][mU][fC][fA][mA][mC][mA] | |
| | | Pattern | [fA][mC][mU][mA][mG][mC][mA][mG] | |
| | | Modified | [mC][mC][mG][ademA-GalNAc][ademA- | |
| | | Sense | GalNAc][ademA-GalNAc][mG][mG][mC] | |
| | | Strand | [mU][mG][mC] | |
| KHK-829- | Hs-Mf | Med-2′- | [mGs][mC][fA][mA][mC][mC][mG][fU] | 807 |
| 838 | commons | Fluoro | [fA][fC][mC][fA][fU][mU][mG][mU] | |
| | | Pattern | [fG][mC][mU][mA][mG][mC][mA][mG] | |
| | | Modified | [mC][mC][mG][ademA-GalNAc][ademA- | |
| | | Sense | GalNAc][ademA-GalNAc][mG][mG][mC] | |
| | | Strand | [mU][mG][mC] | |
| KHK-861- | Hs-Mf- | Med-2′- | [mCs][mU][fG][mC][mC][mA][mG][fA] | 808 |
| 899-730- | Mm-Rn | Fluoro | [fU][fG][mU][fG][fU][mC][mU][mG] | |
| 572 | commons | Pattern | [fC][mU][mA][mA][mG][mC][mA][mG] | |
| | | Modified | [mC][mC][mG][ademA-GalNAc][ademA- | |
| | | Sense | GalNAc][ademA-GalNAc][mG][mG][mC] | |
| | | Strand | [mU][mG][mC] | |
| KHK-865 | Hs | Med-2′- | [mCs][mA][fG][mA][mU][mG][mU][fG] | 809 |
| | unique | Fluoro | [fU][fC][mU][fG][fC][mU][mA][mC] | |
| | | Pattern | [fA][mG][mA][mA][mG][mC][mA][mG] | |
| | | Modified | [mC][mC][mG][ademA-GalNAc][ademA- | |
| | | Sense | GalNAc][ademA-GalNAc][mG][mG][mC] | |
| | | Strand | [mU][mG][mC] | |
| KHK-882- | Hs-Mf | Med-2′- | [mGs][mA][fC][mU][mU][mU][mG][fA] | 810 |
| 920 | commons | Fluoro | [fG][fA][mA][fG][fG][mU][mU][mG] | |
| | | Pattern | [fA][mU][mC][mA][mG][mC][mA][mG] | |
| | | Modified | [mC][mC][mG][ademA-GalNAc][ademA- | |
| | | Sense | GalNAc][ademA-GalNAc][mG][mG][mC] | |
| | | Strand | [mU][mG][mC] | |
| KHK-883- | Hs-Mf | Med-2′- | [mAs][mC][fU][mU][mU][mG][mA][fG] | 811 |
| 921 | commons | Fluoro | [fA][fA][mG][fG][fU][mU][mG][mA] | |
| | | Pattern | [fU][mC][mU][mA][mG][mC][mA][mG] | |
| | | Modified | [mC][mC][mG][ademA-GalNAc][ademA- | |
| | | Sense | GalNAc][ademA-GalNAc][mG][mG][mC] | |
| | | Strand | [mU][mG][mC] | |
| KHK-885- | Hs-Mf | Med-2′- | [mUs][mU][fU][mG][mA][mG][mA][fA] | 812 |
| 923 | commons | Fluoro | [fG][fG][mU][fU][fG][mA][mU][mC] | |
| | | Pattern | [fU][mG][mA][mA][mG][mC][mA][mG] | |
| | | Modified | [mC][mC][mG][ademA-GalNAc][ademA- | |
| | | Sense | GalNAc][ademA-GalNAc][mG][mG][mC] | |
| | | Strand | [mU][mG][mC] | |
| KHK-1054- | Hs-Mf | Med-2′- | [mAs][mG][fC][mU][mG][mU][mU][fU] | 813 |
| 1092 | commons | Fluoro | [fG][fG][mC][fU][fA][mC][mG][mG] | |
| | | Pattern | [fA][mG][mA][mA][mG][mC][mA][mG] | |
| | | Modified | [mC][mC][mG][ademA-GalNAc][ademA- | |
| | | Sense | GalNAc][ademA-GalNAc][mG][mG][mC] | |
| | | Strand | [mU][mG][mC] | |
| KHK-1076- | Hs-Mf- | Med-2′- | [mGs][mG][fU][mG][mU][mU][mU][fG] | 814 |
| 1114-945- | Mm-Rn | Fluoro | [fU][fC][mA][fG][fC][mA][mA][mA] | |
| 787 | commons | Pattern | [fG][mA][mU][mA][mG][mC][mA][mG] | |
| | | Modified | [mC][mC][mG][ademA-GalNAc][ademA- | |
| | | Sense | GalNAc][ademA-GalNAc][mG][mG][mC] | |
| | | Strand | [mU][mG][mC] | |
| KHK-1078- | Hs-Mf- | Med-2′- | [mUs][mG][fU][mU][mU][mG][mU][fC] | 815 |
| 1116-947- | Mm-Rn | Fluoro | [fA][fG][mC][fA][fA][mA][mG][mA] | |
| 789 | commons | Pattern | [fU][mG][mU][mA][mG][mC][mA][mG] | |
| | | Modified | [mC][mC][mG][ademA-GalNAc][ademA- | |
| | | Sense | GalNAc][ademA-GalNAc][mG][mG][mC] | |
| | | Strand | [mU][mG][mC] | |
| KHK-1288- | Hs-Mf | Med-2′- | [mCs][mC][fU][mU][mC][mA][mA][fU] | 816 |
| 1326 | commons | Fluoro | [fG][fC][mC][fU][fC][mC][mG][mU] | |
| | | Pattern | [fC][mA][mU][mA][mG][mC][mA][mG] | |
| | | Modified | [mC][mC][mG][ademA-GalNAc][ademA- | |
| | | Sense | GalNAc][ademA-GalNAc][mG][mG][mC] | |
| | | Strand | [mU][mG][mC] | |
| KHK-1290- | Hs-Mf | Med-2′- | [mUs][mU][fC][mA][mA][mU][mG][fC] | 817 |
| 1328 | commons | Fluoro | [fC][fU][mC][fC][fG][mU][mC][mA] | |
| | | Pattern | [fU][mC][mU][mA][mG][mC][mA][mG] | |
| | | Modified | [mC][mC][mG][ademA-GalNAc][ademA- | |
| | | Sense | GalNAc][ademA-GalNAc][mG][mG][mC] | |
| | | Strand | [mU][mG][mC] | |
| KHK-1334- | Hs-Mf | Med-2′- | [mGs][mC][fA][mG][mG][mA][mA][fG] | 818 |
| 1372 | commons | Fluoro | [fC][fA][mC][fU][fG][mA][mG][mA] | |
| | | Pattern | [fU][mU][mC][mA][mG][mC][mA][mG] | |
| | | Modified | [mC][mC][mG][ademA-GalNAc][ademA- | |
| | | Sense | GalNAc][ademA-GalNAc][mG][mG][mC] | |
| | | Strand | [mU][mG][mC] | |
| KHK-510- | Hs-Mf- | Low-2′- | [MePhosphonate-4O- | 819 |
| 548-379- | Mm-Rn | Fluoro | mUs][fUs][fCs][fU][fG][mC][fU][mU] | |
| 221 | commons | Pattern | [mC][fU][mC][mU][mU][fC][mC][mA] | |
| | | Modified | [mU][mG][mA][mGs][mGs][mG] | |
| | | Anti-sense | | |
| | | Strand | | |
| KHK-516- | Hs-Mf- | Low-2′- | [MePhosphonate-4O- | 820 |
| 554-385- | Mm-Rn | Fluoro | mUs][fAs][fC][fA][fG][mG][fA][mU] | |
| 227 | commons | Pattern | [mC][fU][mG][mC][mU][fU][mC][mU] | |
| | | Modified | [mC][mU][mU][mCs][mGs][mG] | |
| | | Anti-sense | | |
| | | Strand | | |
| KHK-829- | Hs-Mf | Low-2′- | [MePhosphonate-4O- | 821 |
| 838 | commons | Fluoro | mUs][fAs][fG][fC][fA][mC][fA][mA] | |
| | | Pattern | [mU][fG][mG][mU][mA][fC][mG][mG] | |
| | | Modified | [mU][mU][mG][mCs][mGs][mG] | |
| | | Anti-sense | | |
| | | Strand | | |
| KHK-860- | Hs-Mf- | Low-2′- | [MePhosphonate-4O- | 822 |
| 898-729- | Mm-Rn | Fluoro | mUs][fAs][fGs][fC][fA][mG][fA][mC] | |
| 571 | commons | Pattern | [mA][fC][mA][mU][mC][fU][mG][mG] | |
| | | Modified | [mC][mA][mG][mGs][mGs][mG] | |
| | | Anti-sense | | |
| | | Strand | | |
| KHK-861- | Hs-Mf- | Low-2′- | [MePhosphonate-4O- | 823 |
| 899-730- | Mm-Rn | Fluoro | mUs][fUs][fAs][fG][fC][mA][fG][mA] | |
| 572 | commons | Pattern | [mC][fA][mC][mA][mU][fC][mU][mG] | |
| | | Modified | [mG][mC][mA][mGs][mGs][mG] | |
| | | Anti-sense | | |
| | | Strand | | |
| KHK-865 | Hs | Low-2′- | [MePhosphonate-4O- | 824 |
| | unique | Fluoro | mUs][fUs][fCs][fU][fG][mU][fA][mG] | |
| | | Pattern | [mC][fA][mG][mA][mC][fA][mC][mA] | |
| | | Modified | [mU][mC][mU][mGs][mGs][mG] | |
| | | Anti-sense | | |
| | | Strand | | |
| KHK-882- | Hs-Mf | Low-2′- | [MePhosphonate-4O- | 825 |
| 920 | commons | Fluoro | mUs][fGs][fAs][fU][fC][mA][fA][mC] | |
| | | Pattern | [mC][fU][mU][mC][mU][fC][mA][mA] | |
| | | Modified | [mA][mG][mU][mCs][mGs][mG] | |
| | | Anti-sense | | |
| | | Strand | | |
| KHK-883- | Hs-Mf | Low-2′- | [MePhosphonate-4O- | 826 |
| 921 | commons | Fluoro | mUs][fAs][fGs][fA][fU][mC][fA][mA] | |
| | | Pattern | [mC][fC][mU][mU][mC][fU][mC][mA] | |
| | | Modified | [mA][mA][mG][mUs][mGs][mG] | |
| | | Anti-sense | | |
| | | Strand | | |
| KHK-885- | Hs-Mf | Low-2′- | [MePhosphonate-4O- | 827 |
| 923 | commons | Fluoro | mUs][fUs][fCs][fA][fG][mA][fU][mC] | |
| | | Pattern | [mA][fA][mC][mC][mU][fU][mC][mU] | |
| | | Modified | [mC][mA][mA][mAs][mGs][mG] | |
| | | Anti-sense | | |
| | | Strand | | |
| KHK-1054- | Hs-Mf | Low-2′- | [MePhosphonate-4O- | 828 |
| 1092 | commons | Fluoro | mUs][fUs][mCs][mU][fC][mC][fG][fU] | |
| | | Pattern | [mA][fG][mC][fC][mA][fA][mA][fC] | |
| | | Modified | [mA][mG][fC][mUs][mGs][mG] | |
| | | Anti-sense | | |
| | | Strand | | |
| KHK-1075- | Hs-Mf- | Low-2′- | [MePhosphonate-4O- | 829 |
| 1113-944- | Mm-Rn | Fluoro | mUs][fUs][fCs][fU][fU][mU][fG][mC] | |
| 786 | commons | Pattern | [mU][fG][mA][mC][mA][fA][mA][mC] | |
| | | Modified | [mA][mC][mC][mAs][mGs][mG] | |
| | | Anti-sense | | |
| | | Strand | | |
| KHK-1078- | Hs-Mf- | Low-2′- | [MePhosphonate-4O- | 830 |
| 1116-947- | Mm-Rn | Fluoro | mUs][fAs][fC][fA][fU][mC][fU][mU] | |
| 789 | commons | Pattern | [mU][fG][mC][mU][mG][fA][mC][mA] | |
| | | Modified | [mA][mA][mC][mAs][mGs][mG] | |
| | | Anti-sense | | |
| | | Strand | | |
| KHK-1281- | Hs-Mf- | Low-2′- | [MePhosphonate-4O- | 831 |
| 1319-1150- | Mm-Rn | Fluoro | mUs][fAs][fGs][fG][fC][mA][fU][mU] | |
| 992 | commons | Pattern | [mG][fA][mA][mG][mG][fU][mG][mU] | |
| | | Modified | [mC][mU][mC][mCs][mGs][mG] | |
| | | Anti-sense | | |
| | | Strand | | |
| KHK-1288- | Hs-Mf | Low-2′- | [MePhosphonate-4O- | 832 |
| 1326 | commons | Fluoro | mUs][fAs][fUs][fG][fA][mC][fG][mG] | |
| | | Pattern | [mA][fG][mG][mC][mA][fU][mU][mG] | |
| | | Modified | [mA][mA][mG][mGs][mGs][mG] | |
| | | Anti-sense | | |
| | | Strand | | |
| KHK-1290- | Hs-Mf | Low-2′- | [MePhosphonate-4O- | 833 |
| 1328 | commons | Fluoro | mUs][fAs][fGs][fA][fU][mG][fA][mC] | |
| | | Pattern | [mG][fG][mA][mG][mG][fC][mA][mU] | |
| | | Modified | [mU][mG][mA][mAs][mGs][mG] | |
| | | Anti-sense | | |
| | | Strand | | |
| KHK-1148- | Hs-Mf | Low-2′- | [MePhosphonate-4O- | 834 |
| 1186 | commons | Fluoro | mUs][fCs][fCs][fC][fU][mU][fU][mC] | |
| | | Pattern | [mC][fU][mC][mA][mC][fA][mC][mG] | |
| | | Modified | [mA][mC][mC][mAs][mGs][mG] | |
| | | Anti-sense | | |
| | | Strand | | |
| KHK-1152- | Hs-Mf | Low-2′- | [MePhosphonate-4O- | 835 |
| 1190 | commons | Fluoro | mUs][fCs][fAs][fG][fC][mC][fC][mC] | |
| | | Pattern | [mU][fU][mU][mC][mC][fU][mC][mA] | |
| | | Modified | [mC][mA][mC][mGs][mGs][mG] | |
| | | Anti-sense | | |
| | | Strand | | |
| KHK-1154- | Hs-Mf | Low-2′- | [MePhosphonate-4O- | 836 |
| 1192 | commons | Fluoro | mUs][fCs][fAs][fC][fA][mG][fC][mC] | |
| | | Pattern | [mC][fC][mU][mU][mU][fC][mC][mU] | |
| | | Modified | [mC][mA][mC][mAs][mGs][mG] | |
| | | Anti-sense | | |
| | | Strand | | |
| KHK-1155- | Hs-Mf | Low-2′- | [MePhosphonate-4O- | 837 |
| 1193 | commons | Fluoro | mUs][fGs][fCs][fA][fC][mA][fG][mC] | |
| | | Pattern | [mC][fC][mC][mU][mU][fU][mC][mC] | |
| | | Modified | [mU][mC][mA][mCs][mGs][mG] | |
| | | Anti-sense | | |
| | | Strand | | |
| KHK-1277 | Hs | Low-2′- | [MePhosphonate-4O- | 838 |
| | unique | Fluoro | mUs][fAs][fUs][fU][fG][mA][fA][mG] | |
| | | Pattern | [mG][fU][mG][mU][mC][fU][mC][mC] | |
| | | Modified | [mA][mG][mC][mUs][mGs][mG] | |
| | | Anti-sense | | |
| | | Strand | | |
| KHK-1147- | Hs-Mf | Low-2′- | [MePhosphonate-4O- | 839 |
| 1185 | commons | Fluoro | mUs][fCs][fCs][fU][fU][mU][fC][mC] | |
| | | Pattern | [mU][fC][mA][mC][mA][fC][mG][mA] | |
| | | Modified | [mC][mC][mA][mUs][mGs][mG] | |
| | | Anti-sense | | |
| | | Strand | | |
| KHK-869- | Hs-Mf | Low-2′- | [MePhosphonate-4O- | 840 |
| 934 | commons | Fluoro | mUs][fAs][fAs][fA][fG][mU][fC][mU] | |
| | | Pattern | [mG][fU][mA][mG][mC][fA][mG][mA] | |
| | | Modified | [mC][mA][mC][mAs][mGs][mG] | |
| | | Anti-sense | | |
| | | Strand | | |
| KHK-873 | Hs | Low-2′- | [MePhosphonate-4O- | 841 |
| | unique | Fluoro | mUs][fUs][fCs][fU][fC][mA][fA][mA] | |
| | | Pattern | [mG][fU][mC][mU][mG][fU][mA][mG] | |
| | | Modified | [mC][mA][mG][mAs][mGs][mG] | |
| | | Anti-sense | | |
| | | Strand | | |
| KHK-879 | Hs | Low-2′- | [MePhosphonate-4O- | 842 |
| | unique | Fluoro | mUs][fCs][fAs][fA][fC][mC][fU][mU] | |
| | | Pattern | [mC][fU][mC][mA][mA][fA][mG][mU] | |
| | | Modified | [mC][mU][mG][mUs][mGs][mG] | |
| | | Anti-sense | | |
| | | Strand | | |
| KHK-881 | Hs | Low-2′- | [MePhosphonate-4O- | 843 |
| | unique | Fluoro | mUs][fAs][fUs][fC][fA][mA][fC][mC] | |
| | | Pattern | [mU][fU][mC][mU][mC][fA][mA][mA] | |
| | | Modified | [mG][mU][mC][mUs][mGs][mG] | |
| | | Anti-sense | | |
| | | Strand | | |
| KHK-896- | Hs-Mf | Low-2′- | [MePhosphonate-4O- | 844 |
| 934 | commons | Fluoro | mUs][fCs][fUs][fU][fG][mA][fA][mC] | |
| | | Pattern | [mU][fG][mG][mG][mU][fC][mA][mG] | |
| | | Modified | [mA][mU][mC][mAs][mGs][mG] | |
| | | Anti-sense | | |
| | | Strand | | |
| KHK-1064- | Hs-Mf | Low-2′- | [MePhosphonate-4O- | 845 |
| 1102 | commons | Fluoro | mUs][fAs][fAs][fA][fC][mA][fC][mC] | |
| | | Pattern | [mA][fC][mG][mU][mC][fU][mC][mC] | |
| | | Modified | [mG][mU][mA][mGs][mGs][mG] | |
| | | Anti-sense | | |
| | | Strand | | |
| KHK-1077- | Hs-Mf- | Low-2′- | [MePhosphonate-4O- | 846 |
| 1115-946- | Mm-Rn | Fluoro | mUs][fCs][fAs][fU][fC][mU][fU][mU] | |
| 788 | commons | Pattern | [mG][fC][mU][mG][mA][fC][mA][mA] | |
| | | Modified | [mA][mC][mA][mCs][mGs][mG] | |
| | | Anti-sense | | |
| | | Strand | | |
| KHK-1080- | Hs-Mf- | Low-2′- | [MePhosphonate-4O- | 847 |
| 1118-949- | Mm-Rn | Fluoro | mUs][fCs][fCs][fA][fC][mA][fU][mC] | |
| 791 | commons | Pattern | [mU][fU][mU][mG][mC][fU][mG][mA] | |
| | | Modified | [mC][mA][mA][mAs][mGs][mG] | |
| | | Anti-sense | | |
| | | Strand | | |
| KHK-1106- | Hs-Mf | Low-2′- | [MePhosphonate-4O- | 848 |
| 1144 | commons | Fluoro | mUs][fUs][fGs][fC][fU][mG][fA][mC] | |
| | | Pattern | [mU][fG][mG][mA][mA][fC][mC][mC] | |
| | | Modified | [mC][mA][mA][mGs][mGs][mG] | |
| | | Anti-sense | | |
| | | Strand | | |
| KHK-1334- | Hs-Mf | Low-2′- | [MePhosphonate-4O- | 849 |
| 1372 | commons | Fluoro | mUs][fGs][fAs][fA][fU][mC][fU][mC] | |
| | | Pattern | [mA][fG][mU][mG][mC][fU][mU][mC] | |
| | | Modified | [mC][mU][mG][mCs][mGs][mG] | |
| | | Anti-sense | | |
| | | Strand | | |
| KHK-516- | Hs-Mf- | Med-2′- | [MePhosphonate-4O- | 850 |
| 554-385- | Mm-Rn | Fluoro | mUs][fAs][fCs][fA][fG][mG][fA][fU] | |
| 227 | commons | Pattern | [mC][fU][mG][mC][mU][fU][mC][fU] | |
| | | Modified | [mC][mU][fU][mCs][mGs][mG] | |
| | | Anti-sense | | |
| | | Strand | | |
| KHK-804 | Hs | Med-2′- | [MePhosphonate-4O- | 851 |
| | unique | Fluoro | mUs][fAs][fGs][fU][fU][mG][fU][fU] | |
| | | Pattern | [mG][fA][mU][mG][mA][fU][mG][fC] | |
| | | Modified | [mA][mG][fC][mAs][mGs][mG] | |
| | | Anti-sense | | |
| | | Strand | | |
| KHK-829- | Hs-Mf | Med-2′- | [MePhosphonate-4O- | 852 |
| 838 | commons | Fluoro | mUs][fAs][fGs][fC][fA][mC][fA][fA] | |
| | | Pattern | [mU][fG][mG][mU][mA][fC][mG][fG] | |
| | | Modified | [mU][mU][fG][mCs][mGs][mG] | |
| | | Anti-sense | | |
| | | Strand | | |
| KHK-861- | Hs-Mf- | Med-2′- | [MePhosphonate-4O- | 853 |
| 899-730- | Mm-Rn | Fluoro | mUs][fUs][fAs][fG][fC][mA][fG][fA] | |
| 572 | commons | Pattern | [mC][fA][mC][mA][mU][fC][mU][fG] | |
| | | Modified | [mG][mC][fA][mGs][mGs][mG] | |
| | | Anti-sense | | |
| | | Strand | | |
| KHK-865 | Hs | Med-2′- | [MePhosphonate-4O- | 854 |
| | unique | Fluoro | mUs][fUs][fCs][fU][fG][mU][fA][fG] | |
| | | Pattern | [mC][fA][mG][mA][mC][fA][mC][fA] | |
| | | Modified | [mU][mC][fU][mGs][mGs][mG] | |
| | | Anti-sense | | |
| | | Strand | | |
| KHK-882- | Hs-Mf | Med-2′- | [MePhosphonate-4O- | 855 |
| 920 | commons | Fluoro | mUs][fGs][fAs][fU][fC][mA][fA][fC] | |
| | | Pattern | [mC][fU][mU][mC][mU][fC][mA][fA] | |
| | | Modified | [mA][mG][fU][mCs][mGs][mG] | |
| | | Anti-sense | | |
| | | Strand | | |
| KHK-883- | Hs-Mf | Med-2′- | [MePhosphonate-4O- | 856 |
| 921 | commons | Fluoro | mUs][fAs][fGs][fA][fU][mC][fA][fA] | |
| | | Pattern | [mC][fC][mU][mU][mC][fU][mC][fA] | |
| | | Modified | [mA][mA][fG][mUs][mGs][mG] | |
| | | Anti-sense | | |
| | | Strand | | |
| KHK-885- | Hs-Mf | Med-2′- | [MePhosphonate-4O- | 857 |
| 923 | commons | Fluoro | mUs][fUs][fCs][fA][fG][mA][fU][fC] | |
| | | Pattern | [mA][fA][mC][mC][mU][fU][mC][fU] | |
| | | Modified | [mC][mA][fA][mAs][mGs][mG] | |
| | | Anti-sense | | |
| | | Strand | | |
| KHK-1054- | Hs-Mf | Med-2′- | [MePhosphonate-4O- | 858 |
| 1092 | commons | Fluoro | mUs][fUs][mCs][mU][fC][mC][fG][fU] | |
| | | Pattern | [mA][fG][mC][fC][mA][fA][mA][fC] | |
| | | Modified | [mA][mG][fC][mUs][mGs][mG] | |
| | | Anti-sense | | |
| | | Strand | | |
| KHK-1076- | Hs-Mf- | Med-2′- | [MePhosphonate-4O- | 859 |
| 1114-945- | Mm-Rn | Fluoro | mUs][fAs][fUs][fC][fU][mU][fU][fG] | |
| 787 | commons | Pattern | [mC][fU][mG][mA][mC][fA][mA][fA] | |
| | | Modified | [mC][mA][fC][mCs][mGs][mG] | |
| | | Anti-sense | | |
| | | Strand | | |
| KHK-1078- | Hs-Mf- | Med-2′- | [MePhosphonate-4O- | 860 |
| 1116-947- | Mm-Rn | Fluoro | mUs][fAs][fCs][fA][fU][mC][fU][fU] | |
| 789 | commons | Pattern | [mU][fG][mC][mU][mG][fA][mC][fA] | |
| | | Modified | [mA][mA][fC][mAs][mGs][mG] | |
| | | Anti-sense | | |
| | | Strand | | |
| KHK-1288- | Hs-Mf | Med-2′- | [MePhosphonate-4O- | 861 |
| 1326 | commons | Fluoro | mUs][fAs][fUs][fG][fA][mC][fG][fG] | |
| | | Pattern | [mA][fG][mG][mC][mA][fU][mU][fG] | |
| | | Modified | [mA][mA][fG][mGs][mGs][mG] | |
| | | Anti-sense | | |
| | | Strand | | |
| KHK-1290- | Hs-Mf | Med-2′- | [MePhosphonate-4O- | 862 |
| 1328 | commons | Fluoro | mUs][fAs][fGs][fA][fU][mG][fA][fC] | |
| | | Pattern | [mG][fG][mA][mG][mG][fC][mA][fU] | |
| | | Modified | [mU][mG][fA][mAs][mGs][mG] | |
| | | Anti-sense | | |
| | | Strand | | |
| KHK-1334- | Hs-Mf | Med-2′- | [MePhosphonate-4O- | 863 |
| 1372 | commons | Fluoro | mUs][fGs][fAs][fA][fU][mC][fU][fC] | |
| | | Pattern | [mA][fG][mU][mG][mC][fU][mU][fC] | |
| | | Modified | [mC][mU][fG][mCs][mGs][mG] | |
| | | Anti-sense | | |
| | | Strand | | |
| Fam Probe | Fam | N/A | CCCTGGCCATGTTG | 864 |
| | Probe | | | |
| | for NHP | | | |
| | KHK | | | |
| | primers | | | |
| Forward- | Mouse | N/A | TGGAGGTGGAGAAGCCA | 865 |
| 1026 | KHK | | | |
| Primer | | | | |
| Reverse- | Mouse | N/A | GACCATACAAGCCCCTCAAG | 866 |
| 1157 | KHK | | | |
| Primer | | | | |
| Probe- | Probe | N/A | TGGTGTTTGTCAGCAAAGATGTGGC | 867 |
| 1080 | for | | | |
| | Mouse | | | |
| | KHK | | | |
| | primers | | | |
| Forward- | 5′ | N/A | AGGAAGCTCTGGGAGTA | 868 |
| 496 | Assay | | | |
| Primer | | | | |
| Reverse- | 5′ | N/A | CCTCCTTAGGGTACTTGTC | 869 |
| 596 | Assay | | | |
| Primer | | | | |
| Probe-518 | 5′ | N/A | ATGGAAGAGAAGCAGATCCTGTGCG | 870 |
| | Assay | | | |
| | Probe | | | |
| Stem Loop | Un- | N/A | GCAGCCGAAAGGCUGC | 871 |
| | modified | | | |
| | stem | | | |
| | loop | | | |
| | sequence | | | |
| KHK-1277 | Hs | 36mer | AGCUGGAGACACCUUCAAUAGCAGCCGA | 872 |
| | unique | Sense | AAGGCUGC | |
| | | Strand | | |
| KHK-1155- | Hs-Mf | 36mer | GUGAGGAAAGGGGCUGUGCAGCAGCCGA | 873 |
| 1193 | commons | Sense | AAGGCUGC | |
| | | Strand | | |
| KHK-1152- | Hs-Mf | 36mer | CGUGUGAGGAAAGGGGCUGAGCAGCCGA | 874 |
| 1190 | commons | Sense | AAGGCUGC | |
| | | Strand | | |
| KHK-881 | Hs | 36mer | AGACUUUGAGAAGGUUGAUAGCAGCCGA | 875 |
| | unique | Sense | AAGGCUGC | |
| | | Strand | | |
| KHK-879 | Hs | 36mer | ACAGACUUUGAGAAGGUUGAGCAGCCGA | 876 |
| | unique | Sense | AAGGCUGC | |
| | | Strand | | |
| KHK-869 | Hs-Mf | 36mer | UGUGUCUGCUACAGACUUUAGCAGCCGA | 877 |
| | commons | Sense | AAGGCUGC | |
| | | Strand | | |
| KHK-873 | Hs | 36mer | UCUGCUACAGACUUUGAGAAGCAGCCGA | 878 |
| | unique | Sense | AAGGCUGC | |
| | | strand | | |
| KHK-1277 | Hs | 22mer | UAUUGAAGGUGUCUCCAGCUGG | 879 |
| | unique | anti-sense | | |
| | | strand | | |
| KHK-1155- | Hs-Mf | 22mer | UGCACAGCCCCUUUCCUCACGG | 880 |
| 1193 | commons | anti-sense | | |
| | | strand | | |
| KHK-1152- | Hs-Mf | 22mer | UCAGCCCCUUUCCUCACACGGG | 881 |
| 1190 | commons | anti-sense | | |
| | | strand | | |
| KHK-881 | Hs | 22mer | UAUCAACCUUCUCAAAGUCUGG | 882 |
| | unique | anti-sense | | |
| | | strand | | |
| KHK-879 | Hs | 22mer | UCAACCUUCUCAAAGUCUGUGG | 883 |
| | unique | anti-sense | | |
| | | strand | | |
| KHK-869 | Hs-Mf | 22mer | UAAAGUCUGUAGCAGACACAGG | 884 |
| | commons | anti-sense | | |
| | | strand | | |
| KHK-873 | Hs | 22mer | UUCUCAAAGUCUGUAGCAGAGG | 885 |
| | unique | anti-sense | | |
| | | strand | | |
| KHK-510- | Hs-Mf- | 36mer | CUCAUGGAAGAGAAGCAGAAGCAGCCGA | 886 |
| 548-379- | Mm-Rn | Sense | AAGGCUGC | |
| 221 | commons | strand | | |
| KHK-516- | Hs-Mf- | 36mer | GAAGAGAAGCAGAUCCUGUAGCAGCCGA | 887 |
| 554-385- | Mm-Rn | Sense | AAGGCUGC | |
| 227 | commons | strand | | |
| KHK-829- | Hs-Mf | 36mer | GCAACCGUACCAUUGUGCUAGCAGCCGA | 888 |
| 838 | commons | Sense | AAGGCUGC | |
| | | strand | | |
| KHK-860- | Hs-Mf- | 36mer | CCUGCCAGAUGUGUCUGCUAGCAGCCGA | 889 |
| 898-729- | Mm-Rn | Sense | AAGGCUGC | |
| 571 | commons | strand | | |
| KHK-861- | Hs-Mf- | 36mer | CUGCCAGAUGUGUCUGCUAAGCAGCCGA | 890 |
| 899-730- | Mm-Rn | Sense | AAGGCUGC | |
| 572 | commons | strand | | |
| KHK-865 | Hs | 36mer | CAGAUGUGUCUGCUACAGAAGCAGCCGA | 891 |
| | unique | Sense | AAGGCUGC | |
| | | strand | | |
| KHK-882- | Hs-Mf | 36mer | GACUUUGAGAAGGUUGAUCAGCAGCCGA | 892 |
| 920 | commons | Sense | AAGGCUGC | |
| | | strand | | |
| KHK-883- | Hs-Mf | 36mer | ACUUUGAGAAGGUUGAUCUAGCAGCCGA | 893 |
| 921 | commons | Sense | AAGGCUGC | |
| | | strand | | |
| KHK-885- | Hs-Mf | 36mer | UUUGAGAAGGUUGAUCUGAAGCAGCCGA | 894 |
| 923 | commons | Sense | AAGGCUGC | |
| | | strand | | |
| KHK-1054- | Hs-Mf | 36mer | AGCUGUUUGGCUACGGAGAAGCAGCCGA | 895 |
| 1092 | commons | Sense | AAGGCUGC | |
| | | strand | | |
| KHK-1075- | Hs-Mf- | 36mer | UGGUGUUUGUCAGCAAAGAAGCAGCCGA | 896 |
| 1113-944- | Mm-Rn | Sense | AAGGCUGC | |
| 786 | commons | strand | | |
| KHK-1078- | Hs-Mf- | 36mer | UGUUUGUCAGCAAAGAUGUAGCAGCCGA | 897 |
| 1116-947- | Mm-Rn | Sense | AAGGCUGC | |
| 789 | commons | strand | | |
| KHK-1281- | Hs-Mf- | 36mer | GGAGACACCUUCAAUGCCUAGCAGCCGA | 898 |
| 1319-1150- | Mm-Rn | Sense | AAGGCUGC | |
| 992 | commons | strand | | |
| KHK-1288- | Hs-Mf | 36mer | CCUUCAAUGCCUCCGUCAUAGCAGCCGA | 899 |
| 1326 | commons | Sense | AAGGCUGC | |
| | | strand | | |
| KHK-1290- | Hs-Mf | 36mer | UUCAAUGCCUCCGUCAUCUAGCAGCCGA | 900 |
| 1328 | commons | Sense | AAGGCUGC | |
| | | strand | | |
| KHK-1148- | Hs-Mf | 36mer | UGGUCGUGUGAGGAAAGGGAGCAGCCGA | 901 |
| 1186 | commons | Sense | AAGGCUGC | |
| | | strand | | |
| KHK-1154- | Hs-Mf | 36mer | UGUGAGGAAAGGGGCUGUGAGCAGCCGA | 902 |
| 1192 | commons | Sense | AAGGCUGC | |
| | | strand | | |
| KHK-1147- | Hs-Mf | 36mer | AUGGUCGUGUGAGGAAAGGAGCAGCCGA | 903 |
| 1185 | commons | Sense | AAGGCUGC | |
| | | strand | | |
| KHK-896- | Hs-Mf | 36mer | UGAUCUGACCCAGUUCAAGAGCAGCCGA | 904 |
| 934 | commons | Sense | AAGGCUGC | |
| | | strand | | |
| KHK-1064- | Hs-Mf | 36mer | CUACGGAGACGUGGUGUUUAGCAGCCGA | 905 |
| 1102 | commons | Sense | AAGGCUGC | |
| | | strand | | |
| KHK-1077- | Hs-Mf- | 36mer | GUGUUUGUCAGCAAAGAUGAGCAGCCGA | 906 |
| 1115-946- | Mm-Rn | Sense | AAGGCUGC | |
| 788 | commons | strand | | |
| KHK-1080- | Hs-Mf- | 36mer | UUUGUCAGCAAAGAUGUGGAGCAGCCGA | 907 |
| 11 18-949- | Mm-Rn | Sense | AAGGCUGC | |
| 791 | commons | strand | | |
| KHK-1106- | Hs-Mf | 36mer | CUUGGGGUUCCAGUCAGCAAGCAGCCGA | 908 |
| 1144 | commons | Sense | AAGGCUGC | |
| | | strand | | |
| KHK-1334- | Hs-Mf | 36mer | GCAGGAAGCACUGAGAUUCAGCAGCCGA | 909 |
| 1372 | commons | Sense | AAGGCUGC | |
| | | strand | | |
| KHK-804 | Hs | 36mer | UGCUGCAUCAUCAACAACUAGCAGCCGAA | 910 |
| | unique | Sense | AGGCUGC | |
| | | strand | | |
| KHK-1076- | Hs-Mf- | 36mer | GGUGUUUGUCAGCAAAGAUAGCAGCCGA | 911 |
| 1114-945- | Mm-Rn | Sense | AAGGCUGC | |
| 787 | commons | strand | | |
| KHK-510- | Hs-Mf- | 22mer | UUCUGCUUCUCUUCCAUGAGGG | 912 |
| 548-379- | Mm-Rn | anti-sense | | |
| 221 | commons | strand | | |
| KHK-516- | Hs-Mf- | 22mer | UACAGGAUCUGCUUCUCUUCGG | 913 |
| 554-385- | Mm-Rn | anti-sense | | |
| 227 | commons | strand | | |
| KHK-829- | Hs-Mf | 22mer | UAGCACAAUGGUACGGUUGCGG | 914 |
| 838 | commons | anti-sense | | |
| | | strand | | |
| KHK-860- | Hs-Mf- | 22mer | UAGCAGACACAUCUGGCAGGGG | 915 |
| 898-729- | Mm-Rn | anti-sense | | |
| 571 | commons | strand | | |
| KHK-861- | Hs-Mf- | 22mer | UUAGCAGACACAUCUGGCAGGG | 916 |
| 899-730- | Mm-Rn | anti-sense | | |
| 572 | commons | strand | | |
| KHK-865 | Hs | 22mer | UUCUGUAGCAGACACAUCUGGG | 917 |
| | unique | anti-sense | | |
| | | strand | | |
| KHK-882- | Hs-Mf | 22mer | UGAUCAACCUUCUCAAAGUCGG | 918 |
| 920 | commons | anti-sense | | |
| | | strand | | |
| KHK-883- | Hs-Mf | 22mer | UAGAUCAACCUUCUCAAAGUGG | 919 |
| 921 | commons | anti-sense | | |
| | | strand | | |
| KHK-885- | Hs-Mf | 22mer | UUCAGAUCAACCUUCUCAAAGG | 920 |
| 923 | commons | anti-sense | | |
| | | strand | | |
| KHK-1054- | Hs-Mf | 22mer | UUCUCCGUAGCCAAACAGCUGG | 921 |
| 1092 | commons | anti-sense | | |
| | | strand | | |
| KHK-1075- | Hs-Mf- | 22mer | UUCUUUGCUGACAAACACCAGG | 922 |
| 1113-944- | Mm-Rn | anti-sense | | |
| 786 | commons | strand | | |
| KHK-1078- | Hs-Mf- | 22mer | UACAUCUUUGCUGACAAACAGG | 923 |
| 1116-947- | Mm-Rn | anti-sense | | |
| 789 | commons | strand | | |
| KHK-1281- | Hs-Mf- | 22mer | UAGGCAUUGAAGGUGUCUCCGG | 924 |
| 1319-1150- | Mm-Rn | anti-sense | | |
| 992 | commons | strand | | |
| KHK-1288- | Hs-Mf | 22mer | UAUGACGGAGGCAUUGAAGGGG | 925 |
| 1326 | commons | anti-sense | | |
| | | strand | | |
| KHK-1290- | Hs-Mf | 22mer | UAGAUGACGGAGGCAUUGAAGG | 926 |
| 1328 | commons | anti-sense | | |
| | | strand | | |
| KHK-1148- | Hs-Mf | 22mer | UCCCUUUCCUCACACGACCAGG | 927 |
| 1186 | commons | anti-sense | | |
| | | strand | | |
| KHK-1154- | Hs-Mf | 22mer | UCACAGCCCCUUUCCUCACAGG | 928 |
| 1192 | commons | anti-sense | | |
| | | strand | | |
| KHK-1147- | Hs-Mf | 22mer | UCCUUUCCUCACACGACCAUGG | 929 |
| 1185 | commons | anti-sense | | |
| | | strand | | |
| KHK-873 | Hs | 22mer | UUCUCAAAGUCUGUAGCAGAGG | 930 |
| | unique | anti-sense | | |
| | | strand | | |
| KHK-896- | Hs-Mf | 22mer | UGUUGAACUGGGUCAGAUCAGG | 931 |
| 934 | commons | anti-sense | | |
| | | strand | | |
| KHK-1064- | Hs-Mf | 22mer | UAAACACCACGUCUCCGUAGGG | 932 |
| 1102 | commons | anti-sense | | |
| | | strand | | |
| KHK-1077- | Hs-Mf- | 22mer | UCAUCUUUGCUGACAAACACGG | 933 |
| 1115-946- | Mm-Rn | anti-sense | | |
| 788 | commons | strand | | |
| KHK-1080- | Hs-Mf- | 22mer | UCCACAUCUUUGCUGACAAAGG | 934 |
| 1118-949- | Mm-Rn | anti-sense | | |
| 791 | commons | strand | | |
| KHK-1106- | Hs-Mf | 22mer | UUGCUGACUGGAACCCCAAGGG | 935 |
| 1144 | commons | anti-sense | | |
| | | strand | | |
| KHK-1334- | Hs-Mf | 22mer | UGAAUCUCAGUGCUUCCUGCGG | 936 |
| 1372 | commons | anti-sense | | |
| | | strand | | |
| KHK-804 | Hs | 22mer | UAGUUGUUGAUGAUGCAGCAGG | 937 |
| | unique | anti-sense | | |
| | | strand | | |
| KHK-1076- | Hs-Mf- | 22mer | UAUCUUUGCUGACAAACACCGG | 938 |
| 1114-945- | Mm-Rn | anti-sense | | |
| 787 | commons | strand | | |
| MmKHK- | Forward | N/A | GCTCTTCCAGTTGTTTAGCTATGGT | 939 |
| ALL-5-6 | | | | |
| MmKHK- | Reverse | N/A | CAGGTGCTTGGCCACATCTT | 940 |
| ALL-5-6 | | | | |
| MmKHK- | Probe | N/A | AGGTGGTGTTTGTCAGC | 941 |
| ALL-5-6 | | | | |
| KHK-516- | Hs-Mf- | 19mer | GAAGAGAAGCAGAUCCUGU | 942 |
| 554-385- | Mm-Rn | Sense | | |
| 227 | commons | strand | | |
| KHK-865 | Hs | 19mer | CAGAUGUGUCUGCUACAGA | 943 |
| | unique | Sense | | |
| | | strand | | |
| KHK-882- | Hs-Mf | 19mer | GACUUUGAGAAGGUUGAUC | 944 |
| 920 | commons | Sense | | |
| | | strand | | |
| KHK-885- | Hs-Mf | 19mer | UUUGAGAAGGUUGAUCUGA | 945 |
| 923 | commons | Sense | | |
| | | strand | | |
| KHK-1078- | Hs-Mf- | 19mer | UGUUUGUCAGCAAAGAUGU | 946 |
| 1116-947- | Mm-Rn | Sense | | |
| 789 | commons | strand | | |
| KHK-1334- | Hs-Mf | 19mer | GCAGGAAGCACUGAGAUUC | 947 |
| 1372 | commons | Sense | | |
| | | strand | | |
| KHK-516- | Hs-Mf- | 19mer | ACAGGAUCUGCUUCUCUUC | 948 |
| 554-385- | Mm-Rn | anti-sense | | |
| 227 | commons | strand | | |
| KHK-865 | Hs | 19mer | UCUGUAGCAGACACAUCUG | 949 |
| | unique | anti-sense | | |
| | | strand | | |
| KHK-882- | Hs-Mf | 19mer | GAUCAACCUUCUCAAAGUC | 950 |
| 920 | commons | anti-sense | | |
| | | strand | | |
| KHK-885- | Hs-Mf | 19mer | UCAGAUCAACCUUCUCAAA | 951 |
| 923 | commons | anti-sense | | |
| | | strand | | |
| KHK-1078- | Hs-Mf- | 19mer | ACAUCUUUGCUGACAAACA | 952 |
| 1116-947- | Mm-Rn | anti-sense | | |
| 789 | commons | strand | | |
| KHK-1334- | Hs-Mf | 19mer | GAAUCUCAGUGCUUCCUGC | 953 |
| 1372 | commons | anti-sense | | |
| | | strand | | |

[0845] Particular aspects and embodiments of the present invention are described with reference to the following clauses:

[0846] 1. A double stranded RNAi oligonucleotide for reducing ketohexokinase (KHK) expression, the oligonucleotide comprising an antisense strand and a sense strand, wherein the antisense strand and the sense strand form a duplex region, wherein the antisense strand comprises a region of complementarity to a KHK mRNA target sequence of any one of SEQ ID NOs: 4-387 and wherein the region of complementarity is at least 15 contiguous nucleotides in length, or a pharmaceutically acceptable salt thereof.

[0847] 2. The RNAi oligonucleotide of clause 1, wherein the sense strand comprises a sequence set forth in any one of SEQ ID NOs: 4-387.

[0848] 3. The RNAi oligonucleotide of clause 1 or 2, wherein the antisense strand comprises a sequence set forth in any one of SEQ ID NOs: 388-771.

[0849] 4. A double stranded RNAi oligonucleotide for inhibiting expression of KHK, wherein said double stranded RNAi oligonucleotide comprises a sense strand and an antisense strand forming a duplex region, wherein said sense strand comprises at least 15 contiguous nucleotides differing by no more than 3 nucleotides from any one of the nucleotide sequences of SEQ ID NO:4-387 and said antisense strand comprises at least 15 contiguous nucleotides differing by no more than 3 nucleotides from any one of the nucleotide sequences of SEQ ID NO: 388-771, or a pharmaceutically acceptable salt thereof.

[0850] 5. The RNAi oligonucleotide of any one of clauses 1-4, wherein the sense strand is 15 to 50 nucleotides in length.

[0851] 6. The RNAi oligonucleotide of any one of clauses 1-4, wherein the sense strand is 18 to 36 nucleotides in length.

[0852] 7. The RNAi oligonucleotide of any one of clauses 1-4, wherein the sense strand is 15 to 30 nucleotides in length.

[0853] 8. The RNAi oligonucleotide of any one of clauses 1-7, wherein the antisense strand is 15-30 nucleotides in length.

[0854] 9. The RNAi oligonucleotide of any one of clauses 1-8, wherein the antisense strand and the sense strand form a duplex region of at least 19 nucleotides in length, optionally at least 20 nucleotides in length.

[0855] 10. The RNAi oligonucleotide of any one of clauses 1-3 and 5-9, wherein the region of complementarity is at least 19 contiguous nucleotides in length, optionally at least 20 nucleotides in length.

[0856] 11. A double stranded RNAi oligonucleotide for reducing KHK expression, the oligonucleotide comprising:
[0857] (i) an antisense strand of 19-30 nucleotides in length, wherein the antisense strand comprises a nucleotide sequence comprising a region of complementarity to a KHK mRNA target sequence, wherein the region of complementarity is selected from SEQ ID NOs: 948-953, and
[0858] (ii) a sense strand of 19-50 nucleotides in length comprising a region of complementarity to the antisense strand, wherein the antisense and sense strands are separate strands which form an asymmetric duplex region having an overhang of 1-4 nucleotides at the 3′ terminus of the antisense strand.

[0859] 12. The RNAi oligonucleotide of any one of clauses 1-11, wherein the sense strand comprises at its 3′ end a stem-loop set forth as: S1-L-S2, wherein S1 is complementary to S2, and wherein L forms a loop between S1 and S2 of 3 to 5 nucleotides in length.

[0860] 13. The RNAi oligonucleotide of clause 12, wherein L is a triloop or a tetraloop.

[0861] 14. The RNAi oligonucleotide of clause 13, wherein L is a tetraloop.

[0862] 15. The RNAi oligonucleotide of clause 14, wherein the tetraloop comprises the sequence 5′-GAAA-3′.

[0863] 16. The RNAi oligonucleotide of any one of clauses 12-15, wherein the S1 and S2 are 1-10 nucleotides in length and have the same length.

[0864] 17. The RNAi oligonucleotide of clause 16, wherein S1 and S2 are 1 nucleotide, 2 nucleotides, 3 nucleotides, 4 nucleotides, 5 nucleotides, 6 nucleotides, 7 nucleotides, 8 nucleotides, 9 nucleotides, or 10 nucleotides in length.

[0865] 18. The RNAi oligonucleotide of clause 17, wherein S1 and S2 are 6 nucleotides in length.

[0866] 19. The RNAi oligonucleotide of any one of clauses 12-18, wherein the stem-loop comprises the sequence 5′-GCAGCCGAAAGGCUGC-3′ (SEQ ID NO: 871).

[0867] 20. The RNAi oligonucleotide of any one of clauses 1-19, comprising a nicked tetraloop structure.

[0868] 21. The RNAi oligonucleotide of any one of clauses 1-19, comprising a nick between the 3′ terminus of the sense strand and the 5′ terminus of the antisense strand.

[0869] 22. The RNAi oligonucleotide of any one of clauses 1-21, wherein the antisense and sense strands are not covalently linked.

[0870] 23. The RNAi oligonucleotide of any one of clauses 1-10 and 12-22, wherein the antisense strand comprises an overhang of one or more nucleotides in length at the 3′ terminus.

[0871] 24. The RNAi oligonucleotide of any one of clauses 11-23, wherein the overhang comprises purine nucleotides.

[0872] 25. The RNAi oligonucleotide of any one of clauses 11-24, wherein the overhang is 2 nucleotides in length.

[0873] 26. The RNAi oligonucleotide of clause 25, wherein the 3′ overhang is selected from AA, GG, AG, and GA.

[0874] 27. The RNAi oligonucleotide of clause 26, wherein the overhang is GG or AA.

[0875] 28. The RNAi oligonucleotide of clause 26, wherein the overhang is GG.

[0876] 29. The RNAi oligonucleotide of any one of the preceding clauses, wherein the oligonucleotide comprises at least one modified nucleotide.

[0877] 30. The RNAi oligonucleotide of clause 29, wherein the modified nucleotide comprises a 2′-modification.

[0878] 31. The RNAi oligonucleotide of clause 30, wherein the 2′-modification is a modification selected from 2′-aminoethyl, 2′-fluoro, 2′-O-methyl, 2′-O-methoxyethyl, and 2′-deoxy-2′-fluoro-β-d-arabinonucleic acid.

[0879] 32. The RNAi oligonucleotide of any one of clauses 29-31, wherein about 10-15%, 10%, 11%, 12%, 13%, 14% or 15% of the nucleotides of the sense strand comprise a 2′-fluoro modification.

[0880] 33. The RNAi oligonucleotide of any one of clauses 29-32, wherein about 25-35%, 25%, 26%, 27%, 28%, 29%, 30%, 31%, 32%, 33%, 34% or 35% of the nucleotides of the antisense strand comprise a 2′-fluoro modification.

[0881] 34. The RNAi oligonucleotide of any one of clauses 29-33, wherein about 25-35%, 25%, 26%, 27%, 28%, 29%, 30%, 31%, 32%, 33%, 34% or 35% of the nucleotides of the oligonucleotide comprise a 2′-fluoro modification.

[0882] 35. The RNAi oligonucleotide of any one of clauses 29-34, wherein all the nucleotides of the oligonucleotide are modified.

[0883] 36. The RNAi oligonucleotide of any one of clauses 29-34, wherein the sense strand comprises 36 nucleotides with positions 1-36 numbered from 5′ to 3′, wherein positions 8, 9, 10 and 11 of the sense strand are modified.

[0884] 37. The RNAi oligonucleotide of any one of clauses 29-34, wherein the sense strand comprises 36 nucleotides with positions 1-36 numbered from 5′ to 3′, wherein positions 3, 8, 9, 10, 12, 13 and 17 of the sense strand are modified.

[0885] 38. The RNAi oligonucleotide of any one of clauses 29-34, wherein the antisense strand comprises 22 nucleotides with positions 1-22 numbered from 5′ to 3′, and wherein positions 2, 3, 4, 5, 7, 10 and 14 of the antisense strand are modified.

[0886] 39. The RNAi oligonucleotide of any one of clauses 29-34, wherein the antisense strand comprises 22 nucleotides with positions 1-22 numbered from 5′ to 3′, and wherein positions 2-5, 7, 8, 10, 14, 16 and 19 of the antisense strand are modified.

[0887] 40. The RNAi oligonucleotide of any one of clauses 36-39, where the modification is 2′-fluoro.

[0888] 41. The RNAi oligonucleotide of any one of clauses 32-34 and 36-40, wherein the remaining nucleotides comprise a 2′-O-methyl modification.

[0889] 42. The RNAi oligonucleotide of any one of the preceding clauses, wherein the oligonucleotide comprises at least one modified internucleotide linkage.

[0890] 43. The RNAi oligonucleotide of clause 42, wherein the at least one modified internucleotide linkage is a phosphorothioate linkage.

[0891] 44. The RNAi oligonucleotide of clause 43, wherein the antisense strand comprises a phosphorothioate linkage (i) between positions 1 and 2, and between positions 2 and 3; or (ii) between positions 1 and 2, between positions 2 and 3, and between positions 3 and 4, wherein positions are numbered 1-4 from 5′ to 3′.

[0892] 45. The RNAi oligonucleotide of clause 43 or 44, wherein the antisense strand is 22 nucleotides in length, and wherein the antisense strand comprises a phosphorothioate linkage between positions 20 and 21 and between positions 21 and 22, wherein positions are numbered 1-22 from 5′ to 3′.

[0893] 46. The RNAi oligonucleotide of any one of clauses 1-45, wherein the antisense strand comprises a phosphorylated nucleotide at the 5′ terminus, wherein the phosphorylated nucleotide is selected from uridine and adenosine.

[0894] 47. The RNAi oligonucleotide of clause 46, wherein the phosphorylated nucleotide is uridine.

[0895] 48. The RNAi oligonucleotide of any one of the preceding clauses, wherein the 4′-carbon of the sugar of the 5′-terminal nucleotide of the antisense strand comprises a phosphate analog.

[0896] 49. The RNAi oligonucleotide of clause 48, wherein the phosphate analog is oxymethylphosphonate, vinylphosphonate or malonyl phosphonate, optionally wherein the phosphate analog is a 4′-phosphate analog comprising 5′-methoxyphosphonate-4′-oxy.

[0897] 50. The RNAi oligonucleotide of any one of the preceding clauses, wherein at least one nucleotide of the oligonucleotide is conjugated to one or more targeting ligands.

[0898] 51. The RNAi oligonucleotide of clause 50, wherein each targeting ligand comprises a carbohydrate, amino sugar, cholesterol, polypeptide, or lipid.

[0899] 52. The RNAi oligonucleotide of any one of clauses 11-51, wherein the stem loop comprises one or more targeting ligands conjugated to one or more nucleotides of the stem loop.

[0900] 53. The RNAi oligonucleotide of clause 52, wherein the one or more targeting ligands is conjugated to one or more nucleotides of the loop.

[0901] 54. The RNAi oligonucleotide of clause 53, wherein the loop comprises 4 nucleotides numbered 1-4 from 5′ to 3′, wherein nucleotides at positions 2, 3, and 4 each comprise one or more targeting ligands, wherein the targeting ligands are the same or different.

[0902] 55. The RNAi oligonucleotide of any one of clauses 50-54, wherein each targeting ligand comprises a N-acetylgalactosamine (GalNAc) moiety.

[0903] 56. The RNAi oligonucleotide of clause 55, wherein the GalNAc moiety is a monovalent GalNAc moiety, a bivalent GalNAc moiety, a trivalent GalNAc moiety or a tetravalent GalNAc moiety.

[0904] 57. The RNAi oligonucleotide of any one of clauses 11-56, wherein up to 4 nucleotides of L of the stem-loop are each conjugated to a monovalent GalNAc moiety.

[0905] 58. The RNAi oligonucleotide of any one of clauses 1-57, wherein the region of complementarity comprised by the antisense strand is fully complementary to the KHK mRNA target sequence at nucleotide positions 2-8 of the antisense strand, wherein nucleotide positions are numbered 5′ to 3′.

[0906] 59. The RNAi oligonucleotide of any one of clauses 1-57, wherein the region of complementarity comprised by the antisense strand is fully complementary to the KHK mRNA target sequence at nucleotide positions 2-11 of the antisense strand, wherein nucleotide positions are numbered 5′ to 3′.

[0907] 60. The RNAi oligonucleotide of any one of clauses 1-59, wherein the sense strand comprises a nucleotide sequence of any one of SEQ ID NOs: 872-878 and 886-911.

[0908] 61. The RNAi oligonucleotide of any one of clauses 1-60, wherein the antisense strand comprises a nucleotide sequence of any one of SEQ ID NOs: 879-884 and 912-938.

[0909] 62. The RNAi oligonucleotide of any one of clauses 1-61, wherein the sense and antisense strands comprise nucleotide sequences selected from the group consisting of:
[0910] (a) SEQ ID NOs: 886 and 912, respectively;
[0911] (b) SEQ ID NOs: 887 and 913, respectively;
[0912] (c) SEQ ID NOs: 910 and 937, respectively;
[0913] (d) SEQ ID NOs: 888 and 914, respectively;
[0914] (e) SEQ ID NOs: 889 and 915, respectively;
[0915] (f) SEQ ID NOs: 890 and 916, respectively;
[0916] (g) SEQ ID NOs: 891 and 917, respectively;
[0917] (h) SEQ ID NOs: 877 and 884, respectively;
[0918] (i) SEQ ID NOs: 878 and 930, respectively;
[0919] (j) SEQ ID NOs: 876 and 883, respectively;
[0920] (k) SEQ ID NOs: 875 and 882, respectively;
[0921] (l) SEQ ID NOs: 892 and 918, respectively;
[0922] (m) SEQ ID NOs: 893 and 919, respectively;
[0923] (n) SEQ ID NOs: 894 and 920, respectively;
[0924] (o) SEQ ID NOs: 904 and 931, respectively;
[0925] (p) SEQ ID NOs: 895 and 921, respectively;
[0926] (q) SEQ ID NOs: 905 and 932, respectively;
[0927] (r) SEQ ID NOs: 896 and 922, respectively;
[0928] (s) SEQ ID NOs: 911 and 938, respectively;
[0929] (t) SEQ ID NOs: 906 and 933, respectively;
[0930] (u) SEQ ID NOs: 897 and 923, respectively;
[0931] (v) SEQ ID NOs: 907 and 934, respectively;
[0932] (w) SEQ ID NOs: 908 and 935, respectively;
[0933] (x) SEQ ID NOs: 903 and 929, respectively;
[0934] (y) SEQ ID NOs: 901 and 927, respectively;
[0935] (z) SEQ ID NOs: 874 and 881, respectively;
[0936] (aa) SEQ ID NOs: 902 and 928, respectively;
[0937] (bb) SEQ ID NOs: 873 and 880, respectively;
[0938] (cc) SEQ ID NOs: 872 and 879, respectively;
[0939] (dd SEQ ID NOs: 898 and 924, respectively;
[0940] (ee) SEQ ID NOs: 899 and 925, respectively;
[0941] (ff) SEQ ID NOs: 900 and 926, respectively; and
[0942] (gg) SEQ ID NOs: 909 and 936, respectively.

[0943] 63. The RNAi oligonucleotide of any one of clauses 1-62, wherein the sense and antisense strands comprise the nucleotide sequences set forth in SEQ ID NOs: 909 and 936, respectively.

[0944] 64. The RNAi oligonucleotide of any one of clauses 1-62, wherein the sense and antisense strands comprise the nucleotide sequences set forth in SEQ ID NOs: 894 and 920, respectively.

[0945] 65. The RNAi oligonucleotide of any one of clauses 1-62, wherein the sense and antisense strands comprise the nucleotide sequences set forth in SEQ ID NOs: 897 and 923, respectively.

[0946] 66. The RNAi oligonucleotide of any one of clauses 1-62, wherein the sense and antisense strands comprise the nucleotide sequences set forth in SEQ ID NOs: 892 and 918, respectively.

[0947] 67. The RNAi oligonucleotide of any one of clauses 1-62, wherein the sense and antisense strands comprise the nucleotide sequences set forth in SEQ ID NOs: 891 and 917, respectively.

[0948] 68. The RNAi oligonucleotide of any one of clauses 1-62, wherein the sense and antisense strands comprise the nucleotide sequences set forth in SEQ ID NOs: 887 and 913, respectively.

[0949] 69. The RNAi oligonucleotide of any one of clauses 1-59, wherein the antisense strand is 22 nucleotides in length.

[0950] 70. The RNAi oligonucleotide of clause 69, wherein the antisense strand comprises a nucleotide sequence selected from SEQ ID NOs: 913, 917, 918, 920, 923 and 936.

[0951] 71. The RNAi oligonucleotide of any one of clauses 1-59 and 69-70, wherein the sense strand comprises a nucleotide sequence selected from SEQ ID NOs: 942-947.

[0952] 72. The RNAi oligonucleotide of any one of clauses 1-59 and 69-71, wherein the sense strand is 36 nucleotides in length.

[0953] 73. The RNAi oligonucleotide of clause 72, wherein the sense strand comprises a nucleotide sequence selected from SEQ ID NOs: 887, 891, 892, 894, 897 and 909.

[0954] 74. The RNAi oligonucleotide of any one of clauses 60-73, wherein the sense strand and the antisense strand are modified, wherein the antisense strand and the sense strand comprise one or more 2′-fluoro and 2′-O-methyl modified nucleotides and at least one phosphorothioate linkage, wherein the 4′-carbon of the sugar of the 5′-nucleotide of the antisense strand comprises a phosphate analog.

[0955] 75. The RNAi oligonucleotide of any one of clauses 1-59, wherein the sense strand comprises a nucleotide sequence of any one of SEQ ID NOs: 774-804.

[0956] 76. The RNAi oligonucleotide of any one of clauses 1-59 and 75, wherein the antisense strand comprises a nucleotide sequence of any one of SEQ ID NOs: 819-849.

[0957] 77. The RNAi oligonucleotide of any one of clauses 1-59 and 75-76, wherein the sense and antisense strands comprise nucleotide sequences selected from the group consisting of:
[0958] (a) SEQ ID NOs: 774 and 819, respectively;
[0959] (b) SEQ ID NOs: 775 and 820, respectively;
[0960] (c) SEQ ID NOs: 776 and 821, respectively;
[0961] (d) SEQ ID NOs: 777 and 822, respectively;
[0962] (e) SEQ ID NOs: 778 and 823, respectively;
[0963] (f) SEQ ID NOs: 779 and 824, respectively;
[0964] (g) SEQ ID NOs: 780 and 825, respectively;
[0965] (h) SEQ ID NOs: 781 and 826, respectively;
[0966] (i) SEQ ID NOs: 782 and 827, respectively;
[0967] (j) SEQ ID NOs: 783 and 828, respectively;
[0968] (k) SEQ ID NOs: 784 and 829, respectively;
[0969] (l) SEQ ID NOs: 785 and 830, respectively;
[0970] (m) SEQ ID NOs: 786 and 831, respectively;
[0971] (n) SEQ ID NOs: 787 and 832, respectively;
[0972] (o) SEQ ID NOs: 788 and 833, respectively;
[0973] (p) SEQ ID NOs: 789 and 834, respectively;
[0974] (q) SEQ ID NOs: 790 and 835, respectively;
[0975] (r) SEQ ID NOs: 791 and 836, respectively;
[0976] (s) SEQ ID NOs: 792 and 837, respectively;
[0977] (t) SEQ ID NOs: 793 and 838, respectively;
[0978] (u) SEQ ID NOs: 794 and 839, respectively;
[0979] (v) SEQ ID NOs: 795 and 840, respectively;
[0980] (w) SEQ ID NOs: 796 and 841, respectively;
[0981] (x) SEQ ID NOs: 797 and 842, respectively;
[0982] (y) SEQ ID NOs: 798 and 843, respectively;
[0983] (z) SEQ ID NOs: 799 and 844, respectively;
[0984] (aa) SEQ ID NOs: 800 and 845, respectively;
[0985] (bb) SEQ ID NOs: 801 and 846, respectively;
[0986] (cc) SEQ ID NOs: 802 and 847, respectively;
[0987] (dd) SEQ ID NOs: 803 and 848, respectively; and
[0988] (ee) SEQ ID NOs: 804 and 849, respectively.

[0989] 78. The RNAi oligonucleotide of any one of clauses 1-59 and 75-76, wherein the sense and antisense strands comprise the nucleotide sequences set forth in SEQ ID NOs: 804 and 849, respectively.

[0990] 79. The RNAi oligonucleotide of any one of clauses 1-59 and 75-76, wherein the sense and antisense strands comprise the nucleotide sequences set forth in SEQ ID NOs: 782 and 827, respectively.

[0991] 80. The RNAi oligonucleotide of any one of clauses 1-59 and 75-76, wherein the sense and antisense strands comprise the nucleotide sequences set forth in SEQ ID NOs: 775 and 820, respectively.

[0992] 81. The RNAi oligonucleotide of any one of clauses 1-59 and 75-76, wherein the sense and antisense strands comprise the nucleotide sequences set forth in SEQ ID NOs: 779 and 824, respectively.

[0993] 82. The RNAi oligonucleotide of any one of clauses 1-59 and 75-76, wherein the sense and antisense strands comprise the nucleotide sequences set forth in SEQ ID NOs: 780 and 825, respectively.

[0994] 83. The RNAi oligonucleotide of any one of clauses 1-59 and 75-76, wherein the sense and antisense strands comprise the nucleotide sequences set forth in SEQ ID NOs: 785 and 830, respectively.

[0995] 84. The RNAi oligonucleotide of any one of clauses 1-59, wherein the sense strand comprises a nucleotide sequence of any one of SEQ ID NOs: 805-818.

[0996] 85. The RNAi oligonucleotide of any one of clauses 1-59 and 84, wherein the antisense strand comprises a nucleotide sequence of any one of SEQ ID NOs: 850-863

[0997] 86. The RNAi oligonucleotide of any one of clauses 1-59 and 84-85, wherein the sense and antisense strands comprise nucleotide sequences selected from the group consisting of:
[0998] (a) SEQ ID NOs: 805 and 850, respectively;
[0999] (b) SEQ ID NOs: 806 and 851, respectively;
[1000] (c) SEQ ID NOs: 807 and 852, respectively;
[1001] (d) SEQ ID NOs: 808 and 853, respectively;
[1002] (e) SEQ ID NOs: 809 and 854, respectively;
[1003] (f) SEQ ID NOs: 810 and 855, respectively;
[1004] (g) SEQ ID NOs: 811 and 856, respectively;
[1005] (h) SEQ ID NOs: 812 and 857, respectively;
[1006] (i) SEQ ID NOs: 813 and 858, respectively;
[1007] (j) SEQ ID NOs: 814 and 859, respectively;
[1008] (k) SEQ ID NOs: 815 and 860, respectively;
[1009] (l) SEQ ID NOs: 816 and 861, respectively;
[1010] (m) SEQ ID NOs: 817 and 862, respectively and;
[1011] (n) SEQ ID NOs: 818 and 863, respectively.

[1012] 87. The RNAi oligonucleotide of any one of clauses 1-59 and 84-86, wherein the sense and antisense strands comprise the nucleotide sequences set forth in SEQ ID NOs: 805 and 850, respectively.

[1013] 88. The RNAi oligonucleotide of any one of clauses 1-59 and 84-86, wherein the sense and antisense strands comprise the nucleotide sequences set forth in SEQ ID NOs: 809 and 854, respectively.

[1014] 89. The RNAi oligonucleotide of any one of clauses 1-59 and 84-86, wherein the sense and antisense strands comprise the nucleotide sequences set forth in SEQ ID NOs: 810 and 855, respectively.

[1015] 90. The RNAi oligonucleotide of any one of clauses 1-59 and 84-86, wherein the sense and antisense strands comprise the nucleotide sequences set forth in SEQ ID NOs: 812 and 857, respectively.

[1016] 91. The RNAi oligonucleotide of any one of clauses 1-59 and 84-86, wherein the sense and antisense strands comprise the nucleotide sequences set forth in SEQ ID NOs: 815 and 860, respectively.

[1017] 92. The RNAi oligonucleotide of any one of clauses 1-59 and 84-86, wherein the sense and antisense strands comprise the nucleotide sequences set forth in SEQ ID NOs: 818 and 863, respectively.

[1018] 93. A double stranded RNAi oligonucleotide (dsRNAi) for inhibiting expression of KHK, wherein said dsRNAi comprises a sense strand and an antisense strand, the antisense strand comprising a region of complementarity to a KHK RNA transcript, e.g. KHK mRNA, wherein the sense strand comprises the sequence and all of the modifications of 5′-mG-S-mC-mA-mG-mG-mA-mA-fG-fC-fA-fC-mU-mG-mA-mG-mA-mU-mU-mC-mA-mG-mC-mA-mG-mC-mC-mG-[ademA-GalNAc]-[ademA-GalNAc]-[ademA-GalNAc]-mG-mG-mC-mU-mG-mC-3′ (SEQ ID NO: 804), and wherein the antisense strand comprises the sequence and all of the modifications of 5′-[MePhosphonate-40-mU]-S-fG-S-fA-S-fA-fU-mC-fU-mC-mA-fG-mU-mG-mC-fU-mU-mC-mC-mU-mG-mC-S-mG-S-mG-3′ (SEQ ID NO: 849), wherein mC, mA, mG, mU=2′-OMe ribonucleosides; fA, fC, fG, fU-2′F ribonucleosides; “-”=phosphodiester linkage, “—S-”=phosphorothioate linkage, and wherein ademA-GalNAc=

[chemical structure]

or a pharmaceutically acceptable salt thereof.

[1019] 94. A double stranded RNAi oligonucleotide (dsRNAi) for inhibiting expression of KHK, wherein said dsRNAi comprises a sense strand and an antisense strand, the antisense strand comprising a region of complementarity to a KHK RNA transcript, e.g. KHK mRNA, wherein the sense strand comprises the sequence and all of the modifications of 5′-mU-S-mU-mU-mG-mA-mG-mA-fA-fG-fG-fU-mU-mG-mA-mU-mC-mU-mG-mA-mA-mG-mC-mA-mG-mC-mC-mG-[ademA-GalNAc]-[ademA-GalNAc]-[ademA-GalNAc]-mG-mG-mC-mU-mG-mC-3′ (SEQ ID NO: 782), and wherein the antisense strand comprises the sequence and all of the modifications of 5′ [MePhosphonate-40-mU]-S-fU-S-fC-S-fA-fG-mA-fU-mC-mA-fA-mC-mC-mU-fU-mC-mU-mC-mA-mA-mA-S-mG-S-mG-3′ (SEQ ID NO: 827), wherein mC, mA, mG, mU=2′-OMe ribonucleosides; fA, fC, fG, fU=2′F ribonucleosides; “-”=phosphodiester linkage, “—S-”=phosphorothioate linkage, and wherein ademA-GalNAc=

[chemical structure]

or a pharmaceutically acceptable salt thereof.

[1020] 95. A double stranded RNAi oligonucleotide (dsRNAi) for inhibiting expression of KHK, wherein said dsRNAi comprises a sense strand and an antisense strand, the antisense strand comprising a region of complementarity to a KHK RNA transcript, e.g. KHK mRNA, wherein the sense strand comprises the sequence and all of the modifications of 5′-mG-S-mA-mA-mG-mA-mG-mA-fA-fG-fC-fA-mG-mA-mU-mC-mC-mU-mG-mU-mA-mG-mC-mA-mG-mC-mC-mG-[ademA-GalNAc]-[ademA-GalNAc]-[ademA-GalNAc]-mG-mG-mC-mU-mG-mC-3′ (SEQ ID NO: 775), and wherein the antisense strand comprises the sequence and all of the modifications of 5′-[MePhosphonate-40-mU]-S-fA-S-fC-fA-fG-mG-fA-mU-mC-fU-mG-mC-mU-fU-mC-mU-mC-mU-mU-mC-S-mG-S-mG-3′ (SEQ ID NO: 820), wherein mC, mA, mG, mU=2′-OMe ribonucleosides; fA, fC, fG, fU=2′F ribonucleosides; “-”-phosphodiester linkage, “—S-”-phosphorothioate linkage, and wherein ademA-GalNAc=

[chemical structure]

or a pharmaceutically acceptable salt thereof.

[1021] 96. A double stranded RNAi oligonucleotide (dsRNAi) for inhibiting expression of KHK, wherein said dsRNAi comprises a sense strand and an antisense strand, the antisense strand comprising a region of complementarity to a KHK RNA transcript, e.g. KHK mRNA, wherein the sense strand comprises the sequence and all of the modifications of 5′-mC-S-mA-mG-mA-mU-mG-mU-fG-fU-fC-fU-mG-mC-mU-mA-mC-mA-mG-mA-mA-mG-mC-mA-mG-mC-mC-mG-[ademA-GalNAc]-[ademA-GalNAc]-[ademA-GalNAc]-mG-mG-mC-mU-mG-mC-3′ (SEQ ID NO: 779), and wherein the antisense strand comprises the sequence and all of the modifications of 5′-[MePhosphonate-40-mU]-S-fU-S-fC-S-fU-fG-mU-fA-mG-mC-fA-mG-mA-mC-fA-mC-mA-mU-mC-mU-mG-S-mG-S-mG-3′ (SEQ ID NO: 824), wherein mC, mA, mG, mU-2′-OMe ribonucleosides; fA, fC, fG, fU-2′F ribonucleosides; “-”=phosphodiester linkage, “—S-”-phosphorothioate linkage, and wherein ademA-GalNAc=

[chemical structure]

or a pharmaceutically acceptable salt thereof.

[1022] 97. A double stranded RNAi oligonucleotide (dsRNAi) for inhibiting expression of KHK, wherein said dsRNAi comprises a sense strand and an antisense strand, the antisense strand comprising a region of complementarity to a KHK RNA transcript, e.g. KHK mRNA, wherein the sense strand comprises the sequence and all of the modifications of 5′-mG-S-mA-mC-mU-mU-mU-mG-fA-fG-fA-fA-mG-mG-mU-mU-mG-mA-mU-mC-mA-mG-mC-mA-mG-mC-mC-mG-[ademA-GalNAc]-[ademA-GalNAc]-[ademA-GalNAc]-mG-mG-mC-mU-mG-mC-3′ (SEQ ID NO: 780), and wherein the antisense strand comprises the sequence and all of the modifications of 5′-[MePhosphonate-40-mU]-S-fG-S-fA-S-fU-fC-mA-fA-mC-mC-fU-mU-mC-mU-fC-mA-mA-mA-mG-mU-mC-S-mG-S-mG-3′ (SEQ ID NO: 825), wherein mC, mA, mG, mU=2′-OMe ribonucleosides; fA, fC, fG, fU=2′F ribonucleosides; “-”=phosphodiester linkage, “—S-”-phosphorothioate linkage, and wherein ademA-GalNAc=

[chemical structure]

or a pharmaceutically acceptable salt thereof.

[1023] 98. A double stranded RNAi oligonucleotide (dsRNAi) for inhibiting expression of KHK, wherein said dsRNAi comprises a sense strand and an antisense strand, the antisense strand comprising a region of complementarity to a KHK RNA transcript, e.g. KHK mRNA, wherein the sense strand comprises the sequence and all of the modifications of 5′-mU-S-mG-mU-mU-mU-mG-mU-fC-fA-fG-fC-mA-mA-mA-mG-mA-mU-mG-mU-mA-mG-mC-mA-mG-mC-mC-mG-[ademA-GalNAc]-[ademA-GalNAc]-[ademA-GalNAc]-mG-mG-mC-mU-mG-mC-3′ (SEQ ID NO: 785), and wherein the antisense strand comprises the sequence and all of the modifications of 5′-[MePhosphonate-40-mU]-S-fA-S-fC-fA-fU-mC-fU-mU-mU-fG-mC-mU-mG-fA-mC-mA-mA-mA-mC-mA-S-mG-S-mG-3′ (SEQ ID NO: 830), wherein mC, mA, mG, mU=2′-OMe ribonucleosides; fA, fC, fG, fU=2′F ribonucleosides; “-”=phosphodiester linkage, “—S-”-phosphorothioate linkage, and wherein ademA-GalNAc=

[chemical structure]

or a pharmaceutically acceptable salt thereof.

[1024] 99. A dsRNAi oligonucleotide for inhibiting expression of KHK, wherein said dsRNAi comprises a sense strand comprising SEQ ID NO: 775 and an antisense strand comprising SEQ ID NO: 820, the antisense strand comprising a region of complementarity to a KHK RNA transcript, e.g. KHK mRNA, wherein said dsRNAi is in the form of a conjugate having the structure as depicted in FIG. 10A continuing to FIG. 10B, or a pharmaceutically acceptable salt thereof.

[1025] 100. A dsRNAi oligonucleotide for inhibiting expression of KHK, wherein said dsRNAi comprises a sense strand comprising SEQ ID NO: 779 and an antisense strand comprising SEQ ID NO: 824, the antisense strand comprising a region of complementarity to a KHK RNA transcript, e.g. KHK mRNA, wherein said dsRNAi is in the form of a conjugate having the structure as depicted FIG. 11A continuing to FIG. 11B, or a pharmaceutically acceptable salt thereof.

[1026] 101. A dsRNAi oligonucleotide for inhibiting expression of KHK, wherein said dsRNAi comprises a sense strand comprising SEQ ID NO: 780 and an antisense strand comprising SEQ ID NO: 825, the antisense strand comprising a region of complementarity to a KHK RNA transcript, e.g. KHK mRNA, wherein said dsRNAi is in the form of a conjugate having the structure as depicted in FIG. 12A continuing to FIG. 12B, or a pharmaceutically acceptable salt thereof.

[1027] 102. A dsRNAi oligonucleotide for inhibiting expression of KHK, wherein said dsRNAi comprises a sense strand comprising SEQ ID NO: 782 and an antisense strand comprising SEQ ID NO: 827, the antisense strand comprising a region of complementarity to a KHK RNA transcript, e.g. KHK mRNA, wherein said dsRNAi is in the form of a conjugate having the structure FIG. 13A continuing to FIG. 13B, or a pharmaceutically acceptable salt thereof.

[1028] 103. A dsRNAi oligonucleotide for inhibiting expression of KHK, wherein said dsRNAi comprises a sense strand comprising SEQ ID NO: 785 and an antisense strand comprising SEQ ID NO: 830, the antisense strand comprising a region of complementarity to a KHK RNA transcript, e.g. KHK mRNA, wherein said dsRNAi is in the form of a conjugate having the structure FIG. 14A continuing to FIG. 14B, or a pharmaceutically acceptable salt thereof.

[1029] 104. A dsRNAi oligonucleotide for inhibiting expression of KHK, wherein said dsRNAi comprises a sense strand comprising SEQ ID NO: 804 and an antisense strand comprising SEQ ID NO: 849, the antisense strand comprising a region of complementarity to a KHK RNA transcript, e.g. KHK mRNA, wherein said dsRNAi is in the form of a conjugate having the structure of FIG. 15A continuing to FIG. 15B, or a pharmaceutically acceptable salt thereof.

[1030] 105. The RNAi oligonucleotide of any one of clauses 1-104, wherein expression of KHK is reduced or inhibited in vivo.

[1031] 106. The RNAi oligonucleotide of any one of clauses 1-105, wherein the oligonucleotide is a Dicer substrate.

[1032] 107. The RNAi oligonucleotide of any one of clauses 1-105, wherein the oligonucleotide is a Dicer substrate that, upon endogenous Dicer processing, yields double-stranded nucleic acids of 19-23 nucleotides in length capable of reducing KHK expression in a mammalian cell.

[1033] 108. A cell containing the RNAi oligonucleotide of any one of the preceding clauses.

[1034] 109. A method for treating a subject having a disease, disorder or condition associated with KHK expression, the method comprising administering to the subject a therapeutically effective amount of the RNAi oligonucleotide of any one of clauses 1-107, or pharmaceutically acceptable salt thereof, or pharmaceutical composition thereof, thereby treating the subject.

[1035] 110. A pharmaceutical composition comprising the RNAi oligonucleotide of any one of clauses 1-107, or a pharmaceutically acceptable salt thereof, and at least one pharmaceutically acceptable carrier, delivery agent or excipient.

[1036] 111. A method of delivering an oligonucleotide to a subject, the method comprising administering the pharmaceutical composition of clause 110 to the subject.

[1037] 112. An in vitro or in vivo method for modulating, e.g. inhibiting or reducing, KHK expression in a target cell expressing KHK, the method comprising administering the pharmaceutical composition of clause 110 in an effective amount to the target cell.

[1038] 113. A method for reducing KHK expression in a cell, a population of cells or a subject, the method comprising the step of:
[1039] i. contacting the cell or the population of cells with the RNAi oligonucleotide, or a pharmaceutically acceptable salt thereof, of any one of clauses 1-107, or the pharmaceutical composition of clause 110; or
[1040] ii. administering to the subject the RNAi oligonucleotide, or a pharmaceutically acceptable salt thereof of any one of clauses 1-107, or the pharmaceutical composition of clause 110.

[1041] 114. The method of clause 113, wherein reducing KHK expression comprises reducing an amount or level of KHK mRNA, an amount or level of KHK protein, or both.

[1042] 115. The method of any one of clauses 111 and 113-114, wherein the subject has a disease, disorder or condition associated with KHK expression.

[1043] 116. The method of clause 115, wherein the disease, disorder or condition associated with KHK expression is non-alcoholic fatty liver disease (NAFLD) and non-alcoholic steatohepatitis (NASH).

[1044] 117. The method of any one of clauses 109 and 111-116, wherein the RNAi oligonucleotide, or pharmaceutical composition, is administered in combination with a second composition or therapeutic agent.

[1045] 118. A method for treating a subject having a disease, disorder or condition associated with KHK expression, the method comprising administering to the subject a therapeutically effective amount of an RNAi oligonucleotide comprising a sense strand and an antisense strand, or a pharmaceutically acceptable salt thereof, wherein the sense strand and antisense strand comprise nucleotide sequences selected from the group consisting of:
[1046] (a) SEQ ID NOs: 886 and 912, respectively;
[1047] (b) SEQ ID NOs: 887 and 913, respectively;
[1048] (c) SEQ ID NOs: 910 and 937, respectively;
[1049] (d) SEQ ID NOs: 888 and 914, respectively;
[1050] (e) SEQ ID NOs: 889 and 915, respectively;
[1051] (f) SEQ ID NOs: 890 and 916, respectively;
[1052] (g) SEQ ID NOs: 891 and 917, respectively;
[1053] (h) SEQ ID NOs: 877 and 884, respectively;
[1054] (i) SEQ ID NOs: 878 and 930, respectively;
[1055] (j) SEQ ID NOs: 876 and 883, respectively;
[1056] (k) SEQ ID NOs: 875 and 882, respectively;
[1057] (l) SEQ ID NOs: 892 and 918, respectively;
[1058] (m) SEQ ID NOs: 893 and 919, respectively;
[1059] (n) SEQ ID NOs: 894 and 920, respectively;
[1060] (0) SEQ ID NOs: 904 and 931, respectively;
[1061] (p) SEQ ID NOs: 895 and 921, respectively;
[1062] (q) SEQ ID NOs: 905 and 932, respectively;
[1063] (r) SEQ ID NOs: 896 and 922, respectively;
[1064] (s) SEQ ID NOs: 911 and 938, respectively;
[1065] (t) SEQ ID NOs: 906 and 933, respectively;
[1066] (u) SEQ ID NOs: 897 and 923, respectively;
[1067] (v) SEQ ID NOs: 907 and 934, respectively;
[1068] (w) SEQ ID NOs: 908 and 935, respectively;
[1069] (x) SEQ ID NOs: 903 and 929, respectively;
[1070] (y) SEQ ID NOs: 901 and 927, respectively;
[1071] (z) SEQ ID NOs: 874 and 881, respectively;
[1072] (aa) SEQ ID NOs: 902 and 928, respectively;
[1073] (bb) SEQ ID NOs: 873 and 880, respectively;
[1074] (cc) SEQ ID NOs: 872 and 879, respectively;
[1075] (dd) SEQ ID NOs: 898 and 924, respectively;
[1076] (ee) SEQ ID NOs: 899 and 925, respectively
[1077] (ff) SEQ ID NOs: 900 and 926, respectively; and
[1078] (gg) SEQ ID NOs: 909 and 936, respectively.

[1079] 119. The method of clause 118, wherein the sense and antisense strands comprise the nucleotide sequences set forth in SEQ ID NOs: 909 and 936, respectively.

[1080] 120. The method of clause 118, wherein the sense and antisense strands comprise the nucleotide sequences set forth in SEQ ID NOs: 894 and 920, respectively.

[1081] 121. The method of clause 118, wherein the sense and antisense strands comprise the nucleotide sequences set forth in SEQ ID NOs: 897 and 923, respectively.

[1082] 122. The method of clause 118, wherein the sense and antisense strands comprise the nucleotide sequences set forth in SEQ ID NOs: 892 and 918, respectively.

[1083] 123. The method of clause 118, wherein the sense and antisense strands comprise the nucleotide sequences set forth in SEQ ID NOs: 891 and 917, respectively.

[1084] 124. The method of clause 118, wherein the sense and antisense strands comprise the nucleotide sequences set forth in SEQ ID NOs: 887 and 913, respectively.

[1085] 125. A method for treating a subject having a disease, disorder or condition associated with KHK expression, the method comprising administering to the subject a therapeutically effective amount of an RNAi oligonucleotide comprising a sense strand and an antisense strand, or a pharmaceutically acceptable salt thereof, wherein the sense strand and antisense strands are selected from the group consisting of:
[1086] (a) SEQ ID NOs: 774 and 819, respectively;
[1087] (b) SEQ ID NOs: 775 and 820, respectively;
[1088] (c) SEQ ID NOs: 776 and 821, respectively;
[1089] (d) SEQ ID NOs: 777 and 822, respectively;
[1090] (e) SEQ ID NOs: 778 and 823, respectively;
[1091] (f) SEQ ID NOs: 779 and 824, respectively;
[1092] (g) SEQ ID NOs: 780 and 825, respectively;
[1093] (h) SEQ ID NOs: 781 and 826, respectively;
[1094] (i) SEQ ID NOs: 782 and 827, respectively;
[1095] (j) SEQ ID NOs: 783 and 828, respectively;
[1096] (k) SEQ ID NOs: 784 and 829, respectively;
[1097] (l) SEQ ID NOs: 785 and 830, respectively;
[1098] (m) SEQ ID NOs: 786 and 831, respectively;
[1099] (n) SEQ ID NOs: 787 and 832, respectively;
[1100] (o) SEQ ID NOs: 788 and 833, respectively;
[1101] (p) SEQ ID NOs: 789 and 834, respectively;
[1102] (q) SEQ ID NOs: 790 and 835, respectively;
[1103] (r) SEQ ID NOs: 791 and 836, respectively;
[1104] (s) SEQ ID NOs: 792 and 837, respectively;
[1105] (t) SEQ ID NOs: 793 and 838, respectively;
[1106] (u) SEQ ID NOs: 794 and 839, respectively;
[1107] (v) SEQ ID NOs: 795 and 840, respectively;
[1108] (w) SEQ ID NOs: 796 and 841, respectively;
[1109] (x) SEQ ID NOs: 797 and 842, respectively;
[1110] (y) SEQ ID NOs: 798 and 843, respectively;
[1111] (z) SEQ ID NOs: 799 and 844, respectively;
[1112] (aa) SEQ ID NOs: 800 and 845, respectively;
[1113] (bb) SEQ ID NOs: 801 and 846, respectively;
[1114] (cc) SEQ ID NOs: 802 and 847, respectively;
[1115] (dd) SEQ ID NOs: 803 and 848, respectively; and
[1116] (ee) SEQ ID NOs: 804 and 849, respectively.

[1117] 126. The method of clause 125, wherein the sense and antisense strands comprise the nucleotide sequences set forth in SEQ ID NOs: 804 and 849, respectively.

[1118] 127. The method of clause 125 wherein the sense and antisense strands comprise the nucleotide sequences set forth in SEQ ID NOs: 782 and 827, respectively.

[1119] 128. The method of clause 125, wherein the sense and antisense strands comprise the nucleotide sequences set forth in SEQ ID NOs: 775 and 820, respectively.

[1120] 129. The method of clause 125, wherein the sense and antisense strands comprise the nucleotide sequences set forth in SEQ ID NOs: 779 and 824, respectively.

[1121] 130. The method of clause 125, wherein the sense and antisense strands comprise the nucleotide sequences set forth in SEQ ID NOs: 780 and 825, respectively.

[1122] 131. The method of clause 125, wherein the sense and antisense strands comprise the nucleotide sequences set forth in SEQ ID NOs: 785 and 830, respectively.

[1123] 132. A method for treating a subject having a disease, disorder or condition associated with KHK expression, the method comprising administering to the subject a therapeutically effective amount of an RNAi oligonucleotide comprising a sense strand and an antisense strand, or a pharmaceutically acceptable salt thereof, wherein the sense strand and antisense strands are selected from the group consisting of:
[1124] (a) SEQ ID NOs: 805 and 850, respectively;
[1125] (b) SEQ ID NOs: 806 and 851, respectively;
[1126] (c) SEQ ID NOs: 807 and 852, respectively;
[1127] (d) SEQ ID NOs: 808 and 853, respectively;
[1128] (e) SEQ ID NOs: 809 and 854, respectively;
[1129] (f) SEQ ID NOs: 810 and 855, respectively;
[1130] (g) SEQ ID NOs: 811 and 856, respectively;
[1131] (h) SEQ ID NOs: 812 and 857, respectively;
[1132] (i) SEQ ID NOs: 813 and 858, respectively;
[1133] (j) SEQ ID NOs: 814 and 859, respectively;
[1134] (k) SEQ ID NOs: 815 and 860, respectively;
[1135] (l) SEQ ID NOs: 816 and 861, respectively;
[1136] (m) SEQ ID NOs: 817 and 862, respectively and;
[1137] (n) SEQ ID NOs: 818 and 863, respectively.

[1138] 133. The method of clause 132, wherein the sense and antisense strands comprise the nucleotide sequences set forth in SEQ ID NOs: 805 and 850, respectively.

[1139] 134. The method of clause 132, wherein the sense and antisense strands comprise the nucleotide sequences set forth in SEQ ID NOs: 809 and 854, respectively.

[1140] 135. The method of clause 132, wherein the sense and antisense strands comprise the nucleotide sequences set forth in SEQ ID NOs: 810 and 855, respectively.

[1141] 136. The method of clause 132, wherein the sense and antisense strands comprise the nucleotide sequences set forth in SEQ ID NOs: 812 and 857, respectively.

[1142] 137. The method of clause 132, wherein the sense and antisense strands comprise the nucleotide sequences set forth in SEQ ID NOs: 815 and 860, respectively.

[1143] 138. The method of clause 132, wherein the sense and antisense strands comprise the nucleotide sequences set forth in SEQ ID NOs: 818 and 863, respectively.

[1144] 139. The method of any one of clauses 118-138, wherein the disease, disorder or condition associated with KHK expression is non-alcoholic fatty liver disease (NAFLD) and non-alcoholic steatohepatitis (NASH).

[1145] 140. The method of any one of clauses 109, 111 and 113-132, wherein the dsRNA is administered at a concentration of 0.01 mg/kg-5 mg/kg bodyweight of the subject.

[1146] 141. Use of the RNAi oligonucleotide of any one of clauses 1-107, or the pharmaceutical composition of clause 110, in the manufacture of a medicament for the treatment of a disease, disorder or condition associated with KHK expression, optionally for the treatment of non-alcoholic fatty liver disease (NAFLD) and non-alcoholic steatohepatitis (NASH).

[1147] 142. The RNAi oligonucleotide of any one of clauses 1-107, or the pharmaceutical composition of clause 110, for use, or adaptable for use, in the treatment of a disease, disorder or condition associated with KHK expression, optionally for the treatment of non-alcoholic fatty liver disease (NAFLD) and non-alcoholic steatohepatitis (NASH).

[1148] 143. A kit comprising the RNAi oligonucleotide of any one of clauses 1-107, an optional pharmaceutically acceptable carrier, and a package insert comprising instructions for administration to a subject having a disease, disorder or condition associated with KHK expression.

[1149] 144. The use of clause 141, the RNAi oligonucleotide or pharmaceutical composition for use, or adaptable for use, of clause 142, or the kit of clause 143, wherein the disease, disorder or condition associated with KHK expression is non-alcoholic fatty liver disease (NAFLD) and non-alcoholic steatohepatitis (NASH).

[1150] 145. An oligonucleotide for reducing KHK expression, the oligonucleotide comprising a nucleotide sequence of 15-50 nucleotides in length, wherein the nucleotide sequence comprises a region of complementarity to a KHK mRNA target sequence of any one of SEQ ID NOs: 4-387, and wherein the region of complementarity is at least 15 contiguous nucleotides.

[1151] 146. The oligonucleotide of clause 145, wherein the oligonucleotide is single stranded.

[1152] 147. The oligonucleotide of clause 145 or 146, wherein the oligonucleotide is an antisense oligonucleotide.

[1153] 148. The oligonucleotide of any one of clauses 145-147, wherein the nucleotide sequence is 15-30 nucleotides in length.

[1154] 149. The oligonucleotide of any one of clauses 145-148, wherein the nucleotide sequence is 20-25 nucleotides in length.

[1155] 150. The oligonucleotide of any one of clauses 145-149, wherein the nucleotide sequence is 22 nucleotides in length.

[1156] 151. The oligonucleotide of any one of clauses 145-150, wherein the region of complementarity is 19 contiguous nucleotides in length.

[1157] 152. The oligonucleotide of any one of clauses 145-150, wherein the region of complementarity is 20 contiguous nucleotides in length.

[1158] 153. The oligonucleotide of any one of clauses 145-152, wherein the nucleotide sequence comprises at least one modification.

[1159] 154. The oligonucleotide of any one of clauses 145-153, wherein the nucleotide sequence comprises a nucleotide sequence selected from the group consisting of SEQ ID NOs: 879-884 and 912-938.

[1160] 155. The oligonucleotide of any one of clauses 145-153, wherein the nucleotide sequence comprises the nucleotide sequence set forth in SEQ ID NO: 909.

[1161] 156. The oligonucleotide of any one of clauses 145-153, wherein the nucleotide sequence comprises the nucleotide sequence set forth in SEQ ID NO: 894.

[1162] 157. The oligonucleotide of any one of clauses 145-153, wherein the nucleotide sequence comprises the nucleotide sequence set forth in SEQ ID NO: 897.

[1163] 158. The oligonucleotide of any one of clauses 145-153, wherein the nucleotide sequence comprises the nucleotide sequence set forth in SEQ ID NO: 892.

[1164] 159. The oligonucleotide of any one of clauses 145-153, wherein the nucleotide sequence comprises the nucleotide sequence set forth in SEQ ID NO: 891.

[1165] 160. The oligonucleotide of any one of clauses 145-153, wherein the nucleotide sequence comprises the nucleotide sequence set forth in SEQ ID NO: 887.

[1166] 161. A cell comprising the oligonucleotide of any one of clauses 145-160.

[1167] 162. A pharmaceutical composition comprising the oligonucleotide of any one of clauses 145-160, or a pharmaceutically acceptable salt thereof, and at least one pharmaceutically acceptable carrier, delivery agent or excipient.

[1168] 163. A method for treating a subject having a disease, disorder or condition associated with KHK expression, the method comprising administering to the subject a therapeutically effective amount of the oligonucleotide of any one of clauses 145-160, or pharmaceutical composition of clause 162.

[1169] 164. A method of delivering an oligonucleotide to a subject, the method comprising administering the pharmaceutical composition of clause 162 to the subject.

[1170] 165. A method for reducing KHK expression in a cell, a population of cells or a subject, the method comprising the step of:
[1171] i. contacting the cell or the population of cells with the oligonucleotide of any one of clauses 145-160, or the pharmaceutical composition of clause 162; or
[1172] ii. administering to the subject the oligonucleotide of any one of clauses 145-160, or the pharmaceutical composition of clause 162.

[1173] 166. The method of clause 165, wherein reducing KHK expression comprises reducing an amount or level of KHK mRNA, an amount or level of KHK protein, or both.

[1174] 167. The method of any one of clauses 164-166, wherein the subject has a disease, disorder or condition associated with KHK expression.

[1175] 168. The method of clause 167, wherein the disease, disorder or condition associated with KHK expression is non-alcoholic fatty liver disease (NAFLD) and non-alcoholic steatohepatitis (NASH).

[1176] 169. The method of any one of clauses 163-168, wherein the oligonucleotide, or pharmaceutical composition, is administered in combination with a second composition or therapeutic agent.

[1177] 170. Use of the oligonucleotide of any one of clauses 145-160, or the pharmaceutical composition of clause 161, in the manufacture of a medicament for the treatment of a disease, disorder or condition associated with KHK expression, optionally for the treatment of non-alcoholic fatty liver disease (NAFLD) and non-alcoholic steatohepatitis (NASH).

[1178] 171. The oligonucleotide of any one of clauses 145-160, or the pharmaceutical composition of clause 161, for use, or adaptable for use, in the treatment of a disease, disorder or condition associated with KHK expression, optionally for the treatment of non-alcoholic fatty liver disease (NAFLD) and non-alcoholic steatohepatitis (NASH).

[1179] 172. A kit comprising the oligonucleotide of any one of clauses 145-160, an optional pharmaceutically acceptable carrier, and a package insert comprising instructions for administration to a subject having a disease, disorder or condition associated with KHK expression.

[1180] 173. The use of clause 170, the RNAi oligonucleotide or pharmaceutical composition for use, or adaptable for use, of clause 171, or the kit of clause 172, wherein the disease, disorder or condition associated with KHK expression is non-alcoholic fatty liver disease (NAFLD) and non-alcoholic steatohepatitis (NASH).

[1181] 174. A double stranded ribonucleic acid (dsRNA) agent for inhibiting expression of KHK, wherein the dsRNA agent comprises a sense strand and an antisense strand forming a duplex region, wherein the sense strand comprises at least 15 contiguous nucleotides differing by no more than 3 nucleotides from a nucleotide sequence selected from SEQ ID

[1182] NOs: 4-387, and the antisense strand comprises at least 15 contiguous nucleotides differing by no more than 3 nucleotides from a nucleotide sequence selected from SEQ ID NOs: 388-771, or a pharmaceutically acceptable salt thereof.

[1183] 175. A double stranded ribonucleic acid (dsRNA) agent for inhibiting expression of KHK, wherein the dsRNA agent comprises a sense strand and an antisense strand forming a duplex region, wherein the sense strand comprises at least 15 contiguous nucleotides differing by no more than 3 nucleotides from a nucleotide sequence selected from SEQ ID NOs: 872-878 and 886-911, and the antisense strand comprises at least 15 contiguous nucleotides differing by no more than 3 nucleotides from a nucleotide sequence selected from SEQ ID NOs: 879-884 and 912-938, or a pharmaceutically acceptable salt thereof.

[1184] 176. A pharmaceutical composition comprising the dsRNA agent of clause 174 or 175, and a pharmaceutically acceptable diluent, solvent, carrier, salt, and/or adjuvant.

[1185] 177. An in vitro or in vivo method for reducing or inhibiting KHK expression in a target cell expressing KHK, the method comprising administering the pharmaceutical composition of clause 176 in an effective amount to the target cell.

[1186] 178. A method for treating or preventing a disease associated with KHK expression, comprising administering a therapeutically or prophylactically effective amount of the pharmaceutical composition of clause 176 to a subject suffering from or susceptible to the disease.

[1187] 179. The method of any one of clauses 109 and 113-140, wherein a single dose of one or more RNAi oligonucleotides of any one of clauses 1-107, or pharmaceutically acceptable salts thereof, or the pharmaceutical composition of any one of clauses 110, 162, or 176 is administered such that an amount or level of KHK mRNA and/or KHK protein is reduced in the subject when compared to KHK expression prior to administration of the one or more RNAi oligonucleotides, or pharmaceutically acceptable salts thereof, or the pharmaceutical composition and/or when compared to KHK expression in a subject not receiving the one or more RNAi oligonucleotides, or pharmaceutically acceptable salts thereof, or pharmaceutical composition or receiving one or more control oligonucleotides, pharmaceutical compositions or treatments, and wherein said reduction remains detectable at day 28, 56, and/or 84 after the single dose administration.

[1188] 180. The method of clause 179, wherein the amount or level of KHK mRNA and/or KHK protein is reduced by at least about 30%, by at least about 50%, or by at least about 70%.

[1189] 181. The method of any one of clauses 179-180, wherein the dose is administered subcutaneously.

The application's sequence listing, which the Patent Office published only in electronic form, follows.

SEQUENCE LISTING (953 sequences)

SEQ ID NO: 1 - DNA, 2397 bp, Homo sapiens
  source 1..2397: mol_type = genomic DNA
aggcagggctgcagatgcgaggcccagctgtacctcgcgtgtcccgggtcgggagtcggagacgcaggtgcaggagagtgcggggcaagtagcgcattttctctttgcattctcgagatcgcttagccgcgctttaaaaaggtttgcatcagctgtgagtccatctgacaagcgaggaaactaaggctgagaagtgggaggcgttgccatctgcaggcccaggcaacctgctacgggaagaccggggaccaagacctctgggttggctttcctagacccgctcgggtcttcgggtgtcgcgaggaagggccctgctcctttcgttccctgcacccctggccgctgcaggtggctccctggaggaggagctcccacgcggaggaggagccagggcagctgggagcggggacaccatcctcctggataagaggcagaggccgggaggaaccccgtcagccgggcgggcaggaagctctgggagtagcctcatggaagagaagcagatcctgtgcgtggggctagtggtgctggacgtcatcagcctggtggacaagtaccctaaggaggactcggagataaggtgtttgtcccagagatggcagcgcggaggcaacgcgtccaactcctgcaccgttctctccctgctcggagccccctgtgccttcatgggctcaatggctcctggccatgttgctgacttcctggtggccgacttcaggcggcggggcgtggacgtgtctcaggtggcctggcagagcaagggggacacccccagctcctgctgcatcatcaacaactccaatggcaaccgtaccattgtgctccatgacacgagcctgccagatgtgtctgctacagactttgagaaggttgatctgacccagttcaagtggatccacattgagggccggaacgcatcggagcaggtgaagatgctgcagcggatagacgcacacaacaccaggcagcctccagagcagaagatccgggtgtccgtggaggtggagaagccacgagaggagctcttccagctgtttggctacggagacgtggtgtttgtcagcaaagatgtggccaagcacttggggttccagtcagcagaggaagccttgaggggcttgtatggtcgtgtgaggaaaggggctgtgcttgtctgtgcctgggctgaggagggcgccgacgccctgggccctgatggcaaattgctccactcggatgctttcccgccaccccgcgtggtggatacactgggagctggagacaccttcaatgcctccgtcatcttcagcctctcccaggggaggagcgtgcaggaagcactgagattcgggtgccaggtggccggcaagaagtgtggcctgcagggctttgatggcatcgtgtgagagcaggtgccggctcctcacacaccatggagactaccattgcggctgcatcgccttctcccctccatccagcctggcgtccaggttgccctgttcaggggacagatgcaagctgtggggaggactctgcctgtgtcctgtgttccccacagggagaggctctggggggatggctgggggatgcagagcctcagagcaaataaatcttcctcagagccagcttctcctctcaatgtctgaactgctctggctgggcattcctgaggctctgactcttcgatcctccctctttgtgtccattccccaaattaacctctccgcccaggcccagaggaggggctgcctgggctagagcagcgagaagtgccctgggcttgccaccagctctgccctggctggggaggacactcggtgccccacacccagtgaacctgccaaagaaaccgtgagagctcttcggggccctgcgttgtgcagactctattcccacagctcagaagctgggagtccacaccgctgagctgaactgacaggccagtggggggcaggggtgcgcctcctctgccctgcccaccagcctgtgatttgatggggtcttcattgtccagaaatacctcctcccgctgactgccccagagcctgaaagtctcacccttggagcccaccttggaattaagggcgtgcctcagccacaaatgtgacccaggatacagagtgttgctgtcctcagggaggtccgatctggaacacatattggaattggggccaactccaatatagggtgggtaaggccttataatgtaaagagcatataatgtaaagggctttagagtgagacagacctggattaaaatctgccatttaattagctgcatatcaccttagggtacagcacttaacgcaatctgcctcaatttcttcatctgtcaaatggaaccaattctgcttggctacagaattattgtgaggataaaatcatatataaaatgcccagcatgatgcctgatgtgta

SEQ ID NO: 2 - DNA, 2416 bp, Macaca fascicularis
  source 1..2416: mol_type = genomic DNA
ggggccgggcagccgcgaccacggtcttcaggcagggctgcagatgcaggcccagctctacctcgcgggtccagggtcgggagtccgagacgcaggtgcagcagagggcggggcacgtagcgcatttccagcgcattttctctttgcattctcgagatcgcttagccgcgctttagaagggtttgcatcagctccgagtccatctgacaagcgaggaaactgaggctgagaagtgggaggcgttgccatctgcaggcccaggcaacctgctacgggaagaccgggggccaagacctccgggttggctttcccaggccagcttgggtcttcgggtgtcgggagcaaaggcccagctcctttcgtttcctgcacccctcgccgctgcaggtggctccccggaggaggagctcccacgcggaggaggagccagggcagctgggagcgaggacaccatcctcctggataacaggcagaggccgggaggaacccgtcagtcgggcgggcaggaagctctgggatcagcctcatggaagagaagcagatcctgtgcgtggggctagtggtgctggacgtcatcagcctggtggacaagtaccctaaggaggactcagagataaggtgcttgtcccagagatggcaacgcggaggcaacgcgtccaactcctgcaccgttctctccctgctcggagccccctgtgccttcatgggctcaatggcccctggccatgttgctgacttcctggtggccgacttcaggcggcggggtgtggacgtgtctcaggtggcctggcagagcaagggggacacccccagctcctgctgcatcatcaacaactccaatggcaaccgtaccattgtgctccatgacacgagcctgccagatgtgtctgctacggactttgagaaggttgatctgacccagttcaagtggatccacattgagggccggaatgcatcggagcaggtgaagatgctgcagcggatagacgcgcacaacaccaggcagcctccagagcagaagatccgggtgtccgtggaggtggagaagccacaagaggagctctttcagctgtttggctacggagacgtggtgtttgtcagcaaagatgtggccaagcacttggggttccagtcagcaggggaagccctgaggggcttgtatggtcgtgtgaggaaaggggctgtgcttgtctgtgcctgggctgaggagggcgccgacgccctgggccctgatggcaaactgatccactcggatgctttcccgccaccccgcgtggtggataccctgggggctggagacaccttcaatgcctccgtcatcttcagcctctcccaggggaggagcgtgcaggaagcactgagattcggatgccaggtggccggcaagaagtgtggccagcagggctttgatggcatcgtgtcagagccggtgcggtaggaggtgccggctccccgcacactatggaggctgacattgcggctgcatcgccttctcccctccatccagcctggcatccaggttgccctgctcaggggacagatgcaggctgtggggaggactccgcctgtgtcctgtgttccccacacgtctctccctgcagagcctcagagcgaataaatcttcctcggagccagcttcccctggcagcttctgtcctcgatgtctgaactgctctggctgggcattcctgaggctctgactctccagtcctccctcctcgtgtgcattccccaaattaacctctccacccaggcccagaggaggggctgcctgggctatagcagcaagaagtgccccaggcttgccgccagctctgccctggctggggaggacactcagtgccccatacccagcgaacctgccaaagaaccagaagccatgagagctctttggggccctgcgttgtgcagactctattcccatagctcagaagctgggagtccacacggctgagccaaactgacaggccagtggggggcgagggggtggggcgcctcctctgccctgcccaccagcctgtgatttggtggcgtctttgttgtccaaaaatatctcctcccgctgactgccccagagcctgaaagtctcacccgtggagcccaccttggaattaaggggatgcctcagccacaaatgtgacccaagatagagtgttgtcctcagggaggtcggatctggaacacatattggaattggggccaactccaatatagagtggataaggccttataatgtaaagagcacataaggtaaagggctttagagtcagacagacctagattcaaatctgccatttaattagctgcatgtcacctgagggtacagcgcttaacacaatccgcctcaatttcttcatctgtcaaatggagccaattctgcctggctacagaattattgcgaggataaaatcatgta

SEQ ID NO: 3 - DNA, 1455 bp, Mus musculus
  source 1..1455: mol_type = genomic DNA
gagggagagaacgcttgcttctgtgctccgcctgcgaaggcgaagtttctgttgccagactgtgctagtccgggtggtccagggtctgcagcaggcgcagagggatcggaaaggcgatgcattactagtgcgctttcgctttgacagctgaggcggaaaagtgagagggcctgccattggccgggctaggtaacccacccttgcaaagcagaaagctccctgcgggaggagttctgcacgcagaggaggagccaaggtagccagtgagaagttgggacacggtcctccagtagataagaggcagagcccagcaggaaccccctctgcttgcgggtaggaagcttggggagcagcctcatggaagagaagcagatcctgtgcgtggggctggtggtgctggacatcatcaatgtggtggacaaatacccagaggaagacacggatcgcaggtgcctgtcccagagatggcagcgtggaggcaacgcatccaactcctgcactgtcctttccttgcttggagcccgctgtgccttcatgggctctttggcccctggccacgttgccgacttcctggtggctgacttcaggcagaggggcgtggatgtgtctcaagtgacttggcagagccagggagataccccttgctcttgctgcatcgtcaacaactccaatggctcccgtaccattatactctacgacacgaacctgccagatgtgtctgctaaggactttgagaaggtcgatctgacccggttcaagtggatccacattgagggccggaatgcatcggaacaggtgaagatgctgcagcggatagaggagcacaatgccaagcagcctctgccacagaaggtccgggtgtcggtggagatagagaagccccgtgaggagctcttccagttgtttagctatggtgaggtggtgtttgtcagcaaagatgtggccaagcacctggggttccagtcagcagtggaggccctgaggggcttgtacagtcgagtgaagaaaggggctacgcttgtctgtgcctgggctgaggagggtgccgatgccctgggccccgatggtcagctgctccactcagatgccttcccaccgccccgagtagtagacactcttggggctggagacaccttcaatgcctctgtcatcttcagcctctcgaagggaaacagcatgcaagaggccctgagattcgggtgccaggtggctggcaagaagtgtggcttgcaggggtttgatggcattgtgtgagaggcaagcggcaccagctcgatacctcagaggctggcaccatgcctgccactgccttctctacttcctccagcttagcatccagctgccattccccggcaggtgtgggatgtgggacagcctctgtctgtgtctgcgtctctgtatacctatctcctctctgcagatacctggagcaaataaatcttcccctgagccagc

SEQ ID NO: 4 - RNA, 25 nt, synthetic construct
  misc_feature 1..25: note = synthetic construct
  source 1..25: mol_type = other RNA
agcgcattttctctttgcattctcg

SEQ ID NO: 5 - RNA, 25 nt, synthetic construct
  misc_feature 1..25: note = synthetic construct
  source 1..25: mol_type = other RNA
gcgcattttctctttgcattctcga

SEQ ID NO: 6 - RNA, 25 nt, synthetic construct
  misc_feature 1..25: note = synthetic construct
  source 1..25: mol_type = other RNA
cgcattttctctttgcattctcgag

SEQ ID NO: 7 - RNA, 25 nt, synthetic construct
  misc_feature 1..25: note = synthetic construct
  source 1..25: mol_type = other RNA
gcattttctctttgcattctcgaga

SEQ ID NO: 8 - DNA, 25 bp, synthetic construct
  misc_feature 1..25: note = synthetic construct
  modified_base 3..6: mod_base = OTHER; note = uracil
  modified_base 8: mod_base = OTHER; note = uracil
  modified_base 10..12: mod_base = OTHER; note = uracil
  modified_base 16..17: mod_base = OTHER; note = uracil
  modified_base 19: mod_base = OTHER; note = uracil
  source 1..25: mol_type = other DNA
cattttctctttgcattctcgagat

SEQ ID NO: 9 - DNA, 25 bp, synthetic construct
  misc_feature 1..25: note = synthetic construct
  modified_base 2..5: mod_base = OTHER; note = uracil
  modified_base 7: mod_base = OTHER; note = uracil
  modified_base 9..11: mod_base = OTHER; note = uracil
  modified_base 15..16: mod_base = OTHER; note = uracil
  modified_base 18: mod_base = OTHER; note = uracil
  source 1..25: mol_type = other DNA
attttctctttgcattctcgagatc

SEQ ID NO: 10 - RNA, 25 nt, synthetic construct
  misc_feature 1..25: note = synthetic construct
  source 1..25: mol_type = other RNA
ttttctctttgcattctcgagatcg

SEQ ID NO: 11 - RNA, 25 nt, synthetic construct
  misc_feature 1..25: note = synthetic construct
  source 1..25: mol_type = other RNA
tttctctttgcattctcgagatcgc

SEQ ID NO: 12 - DNA, 25 bp, synthetic construct
  misc_feature 1..25: note = synthetic construct
  modified_base 1..2: mod_base = OTHER; note = uracil
  modified_base 4: mod_base = OTHER; note = uracil
  modified_base 6..8: mod_base = OTHER; note = uracil
  modified_base 12..13: mod_base = OTHER; note = uracil
  modified_base 15: mod_base = OTHER; note = uracil
  modified_base 21: mod_base = OTHER; note = uracil
  source 1..25: mol_type = other DNA
ttctctttgcattctcgagatcgct

SEQ ID NO: 13 - DNA, 25 bp, synthetic construct
  misc_feature 1..25: note = synthetic construct
  modified_base 1: mod_base = OTHER; note = uracil
  modified_base 3: mod_base = OTHER; note = uracil
  modified_base 5..7: mod_base = OTHER; note = uracil
  modified_base 11..12: mod_base = OTHER; note = uracil
  modified_base 14: mod_base = OTHER; note = uracil
  modified_base 20: mod_base = OTHER; note = uracil
  source 1..25: mol_type = other DNA
tctctttgcattctcgagatcgctt

SEQ ID NO: 14 - DNA, 25 bp, synthetic construct
  misc_feature 1..25: note = synthetic construct
  modified_base 2: mod_base = OTHER; note = uracil
  modified_base 4..6: mod_base = OTHER; note = uracil
  modified_base 10..11: mod_base = OTHER; note = uracil
  modified_base 13: mod_base = OTHER; note = uracil
  modified_base 19: mod_base = OTHER; note = uracil
  modified_base 23: mod_base = OTHER; note = uracil
  source 1..25: mol_type = other DNA
ctctttgcattctcgagatcgctta

SEQ ID NO: 15 - RNA, 25 nt, synthetic construct
  misc_feature 1..25: note = synthetic construct
  source 1..25: mol_type = other RNA
tctttgcattctcgagatcgcttag

SEQ ID NO: 16 - RNA, 25 nt, synthetic construct
  misc_feature 1..25: note = synthetic construct
  source 1..25: mol_type = other RNA
ctttgcattctcgagatcgcttagc

SEQ ID NO: 17 - RNA, 25 nt, synthetic construct
  misc_feature 1..25: note = synthetic construct
  source 1..25: mol_type = other RNA
tttgcattctcgagatcgcttagcc

SEQ ID NO: 18 - RNA, 25 nt, synthetic construct
  misc_feature 1..25: note = synthetic construct
  source 1..25: mol_type = other RNA
gtgagtccatctgacaagcgaggaa

SEQ ID NO: 19 - RNA, 25 nt, synthetic construct
  misc_feature 1..25: note = synthetic construct
  source 1..25: mol_type = other RNA
gagtccatctgacaagcgaggaaac

SEQ ID NO: 20 - DNA, 25 bp, synthetic construct
  misc_feature 1..25: note = synthetic construct
  modified_base 3: mod_base = OTHER; note = uracil
  modified_base 7: mod_base = OTHER; note = uracil
  modified_base 9: mod_base = OTHER; note = uracil
  source 1..25: mol_type = other DNA
agtccatctgacaagcgaggaaact

SEQ ID NO: 21 - DNA, 25 bp, synthetic construct
  misc_feature 1..25: note = synthetic construct
  modified_base 2: mod_base = OTHER; note = uracil
  modified_base 6: mod_base = OTHER; note = uracil
  modified_base 8: mod_base = OTHER; note = uracil
  source 1..25: mol_type = other DNA
gtccatctgacaagcgaggaaacta

SEQ ID NO: 22 - RNA, 25 nt, synthetic construct
  misc_feature 1..25: note = synthetic construct
  source 1..25: mol_type = other RNA
tccatctgacaagcgaggaaactaa

SEQ ID NO: 23 - RNA, 25 nt, synthetic construct
  misc_feature 1..25: note = synthetic construct
  source 1..25: mol_type = other RNA
ccatctgacaagcgaggaaactaag

SEQ ID NO: 24 - RNA, 25 nt, synthetic construct
  misc_feature 1..25: note = synthetic construct
  source 1..25: mol_type = other RNA
catctgacaagcgaggaaactaagg

SEQ ID NO: 25 - RNA, 25 nt, synthetic construct
  misc_feature 1..25: note = synthetic construct
  source 1..25: mol_type = other RNA
atctgacaagcgaggaaactaaggc

SEQ ID NO: 26 - DNA, 25 bp, synthetic construct
  misc_feature 1..25: note = synthetic construct
  modified_base 1: mod_base = OTHER; note = uracil
  modified_base 3: mod_base = OTHER; note = uracil
  modified_base 19: mod_base = OTHER; note = uracil
  source 1..25: mol_type = other DNA
tctgacaagcgaggaaactaaggct

SEQ ID NO: 27 - RNA, 25 nt, synthetic construct
  misc_feature 1..25: note = synthetic construct
  source 1..25: mol_type = other RNA
ggacaccatcctcctggataagagg

SEQ ID NO: 28 - RNA, 25 nt, synthetic construct
  misc_feature 1..25: note = synthetic construct
  source 1..25: mol_type = other RNA
gacaccatcctcctggataagaggc

SEQ ID NO: 29 - RNA, 25 nt, synthetic construct
  misc_feature 1..25: note = synthetic construct
  source 1..25: mol_type = other RNA
acaccatcctcctggataagaggca

SEQ ID NO: 30 - RNA, 25 nt, synthetic construct
  misc_feature 1..25: note = synthetic construct
  source 1..25: mol_type = other RNA
agcctcatggaagagaagcagatcc

SEQ ID NO: 31 - DNA, 25 bp, synthetic construct
  misc_feature 1..25: note = synthetic construct
  modified_base 4: mod_base = OTHER; note = uracil
  modified_base 7: mod_base = OTHER; note = uracil
  modified_base 22: mod_base = OTHER; note = uracil
  source 1..25: mol_type = other DNA
gcctcatggaagagaagcagatcct

SEQ ID NO: 32 - DNA, 25 bp, synthetic construct
  misc_feature 1..25: note = synthetic construct
  modified_base 3: mod_base = OTHER; note = uracil
  modified_base 6: mod_base = OTHER; note = uracil
  modified_base 21: mod_base = OTHER; note = uracil
  source 1..25: mol_type = other DNA
cctcatggaagagaagcagatcctg

SEQ ID NO: 33 - DNA, 25 bp, synthetic construct
  misc_feature 1..25: note = synthetic construct
  modified_base 2: mod_base = OTHER; note = uracil
  modified_base 5: mod_base = OTHER; note = uracil
  modified_base 20: mod_base = OTHER; note = uracil
  modified_base 23: mod_base = OTHER; note = uracil
  source 1..25: mol_type = other DNA
ctcatggaagagaagcagatcctgt

SEQ ID NO: 34 - DNA, 25 bp, synthetic construct
  misc_feature 1..25: note = synthetic construct
  modified_base 1: mod_base = OTHER; note = uracil
  modified_base 4: mod_base = OTHER; note = uracil
  modified_base 19: mod_base = OTHER; note = uracil
  modified_base 22: mod_base = OTHER; note = uracil
  source 1..25: mol_type = other DNA
tcatggaagagaagcagatcctgtg

SEQ ID NO: 35 - RNA, 25 nt, synthetic construct
  misc_feature 1..25: note = synthetic construct
  source 1..25: mol_type = other RNA
catggaagagaagcagatcctgtgc

SEQ ID NO: 36 - RNA, 25 nt, synthetic construct
  misc_feature 1..25: note = synthetic construct
  source 1..25: mol_type = other RNA
atggaagagaagcagatcctgtgcg

SEQ ID NO: 37 - DNA, 25 bp, synthetic construct
  misc_feature 1..25: note = synthetic construct
  modified_base 1: mod_base = OTHER; note = uracil
  modified_base 16: mod_base = OTHER; note = uracil
  modified_base 19: mod_base = OTHER; note = uracil
  modified_base 21: mod_base = OTHER; note = uracil
  source 1..25: mol_type = other DNA
tggaagagaagcagatcctgtgcgt

SEQ ID NO: 38 - DNA, 25 bp, synthetic construct
  misc_feature 1..25: note = synthetic construct
  modified_base 15: mod_base = OTHER; note = uracil
  modified_base 18: mod_base = OTHER; note = uracil
  modified_base 20: mod_base = OTHER; note = uracil
  source 1..25: mol_type = other DNA
ggaagagaagcagatcctgtgcgtg

SEQ ID NO: 39 - RNA, 25 nt, synthetic construct
  misc_feature 1..25: note = synthetic construct
  source 1..25: mol_type = other RNA
gaagagaagcagatcctgtgcgtgg

SEQ ID NO: 40 - RNA, 25 nt, synthetic construct
  misc_feature 1..25: note = synthetic construct
  source 1..25: mol_type = other RNA
aagagaagcagatcctgtgcgtggg

SEQ ID NO: 41 - RNA, 25 nt, synthetic construct
  misc_feature 1..25: note = synthetic construct
  source 1..25: mol_type = other RNA
agagaagcagatcctgtgcgtgggg

SEQ ID NO: 42 - DNA, 25 bp, synthetic construct
  misc_feature 1..25: note = synthetic construct
  modified_base 10: mod_base = OTHER; note = uracil
  modified_base 13: mod_base = OTHER; note = uracil
  modified_base 15: mod_base = OTHER; note = uracil
  modified_base 19: mod_base = OTHER; note = uracil
  source 1..25: mol_type = other DNA
agaagcagatcctgtgcgtggggct

SEQ ID NO: 43 - DNA, 25 bp, synthetic construct
  misc_feature 1..25: note = synthetic construct
  modified_base 9: mod_base = OTHER; note = uracil
  modified_base 12: mod_base = OTHER; note = uracil
  modified_base 14: mod_base = OTHER; note = uracil
  modified_base 18: mod_base = OTHER; note = uracil
  source 1..25: mol_type = other DNA
gaagcagatcctgtgcgtggggcta

SEQ ID NO: 44 - RNA, 25 nt, synthetic construct
  misc_feature 1..25: note = synthetic construct
  source 1..25: mol_type = other RNA
aagcagatcctgtgcgtggggctag

SEQ ID NO: 45 - RNA, 25 nt, synthetic construct
  misc_feature 1..25: note = synthetic construct
  source 1..25: mol_type = other RNA
ggctagtggtgctggacgtcatcag

SEQ ID NO: 46 - DNA, 25 bp, synthetic construct
  misc_feature 1..25: note = synthetic construct
  modified_base 1: mod_base = OTHER; note = uracil
  modified_base 4: mod_base = OTHER; note = uracil
  modified_base 7: mod_base = OTHER; note = uracil
  modified_base 10: mod_base = OTHER; note = uracil
  modified_base 16: mod_base = OTHER; note = uracil
  modified_base 19: mod_base = OTHER; note = uracil
  source 1..25: mol_type = other DNA
tagtggtgctggacgtcatcagcct

SEQ ID NO: 47 - RNA, 25 nt, synthetic construct
  misc_feature 1..25: note = synthetic construct
  source 1..25: mol_type = other RNA
gtggtgctggacgtcatcagcctgg

SEQ ID NO: 48 - DNA, 25 bp, synthetic construct
  misc_feature 1..25: note = synthetic construct
  modified_base 1: mod_base = OTHER; note = uracil
  modified_base 4: mod_base = OTHER; note = uracil
  modified_base 7: mod_base = OTHER; note = uracil
  modified_base 13: mod_base = OTHER; note = uracil
  modified_base 16: mod_base = OTHER; note = uracil
  modified_base 22: mod_base = OTHER; note = uracil
  source 1..25: mol_type = other DNA
tggtgctggacgtcatcagcctggt

SEQ ID NO: 49 - DNA, 25 bp, synthetic construct
  misc_feature 1..25: note = synthetic construct
  modified_base 3: mod_base = OTHER; note = uracil
  modified_base 6: mod_base = OTHER; note = uracil
  modified_base 12: mod_base = OTHER; note = uracil
  modified_base 15: mod_base = OTHER; note = uracil
  modified_base 21: mod_base = OTHER; note = uracil
  source 1..25: mol_type = other DNA
ggtgctggacgtcatcagcctggtg

SEQ ID NO: 50 - RNA, 25 nt, synthetic construct
  misc_feature 1..25: note = synthetic construct
  source 1..25: mol_type = other RNA
gtgctggacgtcatcagcctggtgg

SEQ ID NO: 51 - RNA, 25 nt, synthetic construct
  misc_feature 1..25: note = synthetic construct
  source 1..25: mol_type = other RNA
tgctggacgtcatcagcctggtgga

SEQ ID NO: 52 - RNA, 25 nt, synthetic construct
  misc_feature 1..25: note = synthetic construct
  source 1..25: mol_type = other RNA
gctggacgtcatcagcctggtggac

SEQ ID NO: 53 - RNA, 25 nt, synthetic construct
  misc_feature 1..25: note = synthetic construct
  source 1..25: mol_type = other RNA
ctggacgtcatcagcctggtggaca

SEQ ID NO: 54 - RNA, 25 nt, synthetic construct
  misc_feature 1..25: note = synthetic construct
  source 1..25: mol_type = other RNA
tggacgtcatcagcctggtggacaa

SEQ ID NO: 55 - RNA, 25 nt, synthetic construct
  misc_feature 1..25: note = synthetic construct
  source 1..25: mol_type = other RNA
ggacgtcatcagcctggtggacaag

SEQ ID NO: 56 - DNA, 25 bp, synthetic construct
  misc_feature 1..25: note = synthetic construct
  modified_base 5: mod_base = OTHER; note = uracil
  modified_base 8: mod_base = OTHER; note = uracil
  modified_base 14: mod_base = OTHER; note = uracil
  modified_base 17: mod_base = OTHER; note = uracil
  source 1..25: mol_type = other DNA
gacgtcatcagcctggtggacaagt

SEQ ID NO: 57 - DNA, 25 bp, synthetic construct
  misc_feature 1..25: note = synthetic construct
  modified_base 4: mod_base = OTHER; note = uracil
  modified_base 7: mod_base = OTHER; note = uracil
  modified_base 13: mod_base = OTHER; note = uracil
  modified_base 16: mod_base = OTHER; note = uracil
  source 1..25: mol_type = other DNA
acgtcatcagcctggtggacaagta

SEQ ID NO: 58 - RNA, 25 nt, synthetic construct
  misc_feature 1..25: note = synthetic construct
  source 1..25: mol_type = other RNA
cgtcatcagcctggtggacaagtac

SEQ ID NO: 59 - RNA, 25 nt, synthetic construct
  misc_feature 1..25: note = synthetic construct
  source 1..25: mol_type = other RNA
gtcatcagcctggtggacaagtacc

SEQ ID NO: 60 - RNA, 25 nt, synthetic construct
  misc_feature 1..25: note = synthetic construct
  source 1..25: mol_type = other RNA
tcatcagcctggtggacaagtaccc

SEQ ID NO: 61 - DNA, 25 bp, synthetic construct
  misc_feature 1..25: note = synthetic construct
  modified_base 3: mod_base = OTHER; note = uracil
  modified_base 9: mod_base = OTHER; note = uracil
  modified_base 12: mod_base = OTHER; note = uracil
  modified_base 20: mod_base = OTHER; note = uracil
  source 1..25: mol_type = other DNA
catcagcctggtggacaagtaccct

SEQ ID NO: 62 - DNA, 25 bp, synthetic construct
  misc_feature 1..25: note = synthetic construct
  modified_base 2: mod_base = OTHER; note = uracil
  modified_base 8: mod_base = OTHER; note = uracil
  modified_base 11: mod_base = OTHER; note = uracil
  modified_base 19: mod_base = OTHER; note = uracil
  source 1..25: mol_type = other DNA
atcagcctggtggacaagtacccta

SEQ ID NO: 63 - RNA, 25 nt, synthetic construct
  misc_feature 1..25: note = synthetic construct
  source 1..25: mol_type = other RNA
tcagcctggtggacaagtaccctaa

SEQ ID NO: 64 - RNA, 25 nt, synthetic construct
  misc_feature 1..25: note = synthetic construct
  source 1..25: mol_type = other RNA
cagcctggtggacaagtaccctaag

SEQ ID NO: 65 - RNA, 25 nt, synthetic construct
  misc_feature 1..25: note = synthetic construct
  source 1..25: mol_type = other RNA
agcctggtggacaagtaccctaagg

SEQ ID NO: 66 - RNA, 25 nt, synthetic construct
  misc_feature 1..25: note = synthetic construct
  source 1..25: mol_type = other RNA
gcctggtggacaagtaccctaagga

SEQ ID NO: 67 - RNA, 25 nt, synthetic construct
  misc_feature 1..25: note = synthetic construct
  source 1..25: mol_type = other RNA
cctggtggacaagtaccctaaggag

SEQ ID NO: 68 - RNA, 25 nt, synthetic construct
  misc_feature 1..25: note = synthetic construct
  source 1..25: mol_type = other RNA
ctggtggacaagtaccctaaggagg

SEQ ID NO: 69 - RNA, 25 nt, synthetic construct
  misc_feature 1..25: note = synthetic construct
  source 1..25: mol_type = other RNA
tggtggacaagtaccctaaggagga

SEQ ID NO: 70 - RNA, 25 nt, synthetic construct
  misc_feature 1..25: note = synthetic construct
  source 1..25: mol_type = other RNA
ggtggacaagtaccctaaggaggac

SEQ ID NO: 71 - DNA, 25 bp, synthetic construct
  misc_feature 1..25: note = synthetic construct
  modified_base 2: mod_base = OTHER; note = uracil
  modified_base 10: mod_base = OTHER; note = uracil
  modified_base 15: mod_base = OTHER; note = uracil
  source 1..25: mol_type = other DNA
gtggacaagtaccctaaggaggact

SEQ ID NO: 72 - DNA, 25 bp, synthetic construct
  misc_feature 1..25: note = synthetic construct
  modified_base 1: mod_base = OTHER; note = uracil
  modified_base 9: mod_base = OTHER; note = uracil
  modified_base 14: mod_base = OTHER; note = uracil
  source 1..25: mol_type = other DNA
tggacaagtaccctaaggaggactc

SEQ ID NO: 73 - RNA, 25 nt, synthetic construct
  misc_feature 1..25: note = synthetic construct
  source 1..25: mol_type = other RNA
ggacaagtaccctaaggaggactcg

SEQ ID NO: 74 - RNA, 25 nt, synthetic construct
  misc_feature 1..25: note = synthetic construct
  source 1..25: mol_type = other RNA
gacaagtaccctaaggaggactcgg

SEQ ID NO: 75 - RNA, 25 nt, synthetic construct
  misc_feature 1..25: note = synthetic construct
  source 1..25: mol_type = other RNA
acaagtaccctaaggaggactcgga

SEQ ID NO: 76 - RNA, 25 nt, synthetic construct
  misc_feature 1..25: note = synthetic construct
  source 1..25: mol_type = other RNA
caagtaccctaaggaggactcggag

SEQ ID NO: 77 - RNA, 25 nt, synthetic construct
  misc_feature 1..25: note = synthetic construct
  source 1..25: mol_type = other RNA
aagtaccctaaggaggactcggaga

SEQ ID NO: 78 - DNA, 25 bp, synthetic construct
  misc_feature 1..25: note = synthetic construct
  modified_base 3: mod_base = OTHER; note = uracil
  modified_base 8: mod_base = OTHER; note = uracil
  modified_base 18: mod_base = OTHER; note = uracil
  source 1..25: mol_type = other DNA
agtaccctaaggaggactcggagat

SEQ ID NO: 79 - DNA, 25 bp, synthetic construct
  misc_feature 1..25: note = synthetic construct
  modified_base 5: mod_base = OTHER; note = uracil
  modified_base 11: mod_base = OTHER; note = uracil
  modified_base 14: mod_base = OTHER; note = uracil
  modified_base 21..22: mod_base = OTHER; note = uracil
  source 1..25: mol_type = other DNA
cgcgtccaactcctgcaccgttctc

SEQ ID NO: 80 - RNA, 25 nt, synthetic construct
  misc_feature 1..25: note = synthetic construct
  source 1..25: mol_type = other RNA
gtccaactcctgcaccgttctctcc

SEQ ID NO: 81 - RNA, 25 nt, synthetic construct
  misc_feature 1..25: note = synthetic construct
  source 1..25: mol_type = other RNA
tccaactcctgcaccgttctctccc

SEQ ID NO: 82 - DNA, 25 bp, synthetic construct
  misc_feature 1..25: note = synthetic construct
  modified_base 6: mod_base = OTHER; note = uracil
  modified_base 9: mod_base = OTHER; note = uracil
  modified_base 16..17: mod_base = OTHER; note = uracil
  modified_base 19: mod_base = OTHER; note = uracil
  modified_base 21: mod_base = OTHER; note = uracil
  source 1..25: mol_type = other DNA
ccaactcctgcaccgttctctccct

SEQ ID NO: 83 - DNA, 25 bp, synthetic construct
  misc_feature 1..25: note = synthetic construct
  modified_base 5: mod_base = OTHER; note = uracil
  modified_base 8: mod_base = OTHER; note = uracil
  modified_base 15..16: mod_base = OTHER; note = uracil
  modified_base 18: mod_base = OTHER; note = uracil
  modified_base 20: mod_base = OTHER; note = uracil
  source 1..25: mol_type = other DNA
caactcctgcaccgttctctccctg

SEQ ID NO: 84 - RNA, 25 nt, synthetic construct
  misc_feature 1..25: note = synthetic construct
  source 1..25: mol_type = other RNA
aactcctgcaccgttctctccctgc

SEQ ID NO: 85 - DNA, 25 bp, synthetic construct
  misc_feature 1..25: note = synthetic construct
  modified_base 3: mod_base = OTHER; note = uracil
  modified_base 6: mod_base = OTHER; note = uracil
  modified_base 13..14: mod_base = OTHER; note = uracil
  modified_base 16: mod_base = OTHER; note = uracil
  modified_base 18: mod_base = OTHER; note = uracil
  modified_base 22: mod_base = OTHER; note = uracil
  source 1..25: mol_type = other DNA
actcctgcaccgttctctccctgct

SEQ ID NO: 86 - DNA, 25 bp, synthetic construct
  misc_feature 1..25: note = synthetic construct
  modified_base 2: mod_base = OTHER; note = uracil
  modified_base 5: mod_base = OTHER; note = uracil
  modified_base 12..13: mod_base = OTHER; note = uracil
  modified_base 15: mod_base = OTHER; note = uracil
  modified_base 17: mod_base = OTHER; note = uracil
  modified_base 21: mod_base = OTHER; note = uracil
  source 1..25: mol_type = other DNA
ctcctgcaccgttctctccctgctc

SEQ ID NO: 87 - RNA, 25 nt, synthetic construct
  misc_feature 1..25: note = synthetic construct
  source 1..25: mol_type = other RNA
ctgcaccgttctctccctgctcgga

SEQ ID NO: 88 - DNA, 25 bp, synthetic construct
  misc_feature 1..25: note = synthetic construct
  modified_base 6: mod_base = OTHER; note = uracil
  modified_base 8: mod_base = OTHER; note = uracil
  modified_base 12..13: mod_base = OTHER; note = uracil
  modified_base 16: mod_base = OTHER; note = uracil
  modified_base 21: mod_base = OTHER; note = uracil
  source 1..25: mol_type = other DNA
ccccctgtgccttcatgggctcaat

SEQ ID NO: 89 - RNA, 25 nt, synthetic construct
  misc_feature 1..25: note = synthetic construct
  source 1..25: mol_type = other RNA
tgttgctgacttcctggtggccgac

SEQ ID NO: 90 - RNA, 25 nt, synthetic construct
  misc_feature 1..25: note = synthetic construct
  source 1..25: mol_type = other RNA
atggcaaccgtaccattgtgctcca

SEQ ID NO: 91 - DNA, 25 bp, synthetic construct
  misc_feature 1..25: note = synthetic construct
  modified_base 1: mod_base = OTHER; note = uracil
  modified_base 10: mod_base = OTHER; note = uracil
  modified_base 15..16: mod_base = OTHER; note = uracil
  modified_base 18: mod_base = OTHER; note = uracil
  modified_base 21: mod_base = OTHER; note = uracil
  source 1..25: mol_type = other DNA
tggcaaccgtaccattgtgctccat

SEQ ID NO: 92 - RNA, 25 nt, synthetic construct
  misc_feature 1..25: note = synthetic construct
  source 1..25: mol_type = other RNA
gcaaccgtaccattgtgctccatga

SEQ ID NO: 93 - RNA, 25 nt, synthetic construct
  misc_feature 1..25: note = synthetic construct
  source 1..25: mol_type = other RNA
caaccgtaccattgtgctccatgac

SEQ ID NO: 94 - RNA, 25 nt, synthetic construct
  misc_feature 1..25: note = synthetic construct
  source 1..25: mol_type = other RNA
aaccgtaccattgtgctccatgaca

SEQ ID NO: 95 - RNA, 25 nt, synthetic construct
  misc_feature 1..25: note = synthetic construct
  source 1..25: mol_type = other RNA
accgtaccattgtgctccatgacac

SEQ ID NO: 96 - RNA, 25 nt, synthetic construct
  misc_feature 1..25: note = synthetic construct
  source 1..25: mol_type = other RNA
gagcctgccagatgtgtctgctaca

SEQ ID NO: 97 - RNA, 25 nt, synthetic construct
  misc_feature 1..25: note = synthetic construct
  source 1..25: mol_type = other RNA
agcctgccagatgtgtctgctacag

SEQ ID NO: 98 - RNA, 25 nt, synthetic construct
  misc_feature 1..25: note = synthetic construct
  source 1..25: mol_type = other RNA
gcctgccagatgtgtctgctacaga

SEQ ID NO: 99 - RNA, 25 nt, synthetic construct
  misc_feature 1..25: note = synthetic construct
  source 1..25: mol_type = other RNA
cctgccagatgtgtctgctacagac

SEQ ID NO: 100 - DNA, 25 bp, synthetic construct
  misc_feature 1..25: note = synthetic construct
  modified_base 2: mod_base = OTHER; note = uracil
  modified_base 9: mod_base = OTHER; note = uracil
  modified_base 11: mod_base = OTHER; note = uracil
  modified_base 13: mod_base = OTHER; note = uracil
  modified_base 15: mod_base = OTHER; note = uracil
  modified_base 18: mod_base = OTHER; note = uracil
  source 1..25: mol_type = other DNA
ctgccagatgtgtctgctacagact

SEQ ID NO: 101 - DNA, 25 bp, synthetic construct
  misc_feature 1..25: note = synthetic construct
  modified_base 1: mod_base = OTHER; note = uracil
  modified_base 8: mod_base = OTHER; note = uracil
  modified_base 10: mod_base = OTHER; note = uracil
  modified_base 12: mod_base = OTHER; note = uracil
  modified_base 14: mod_base = OTHER; note = uracil
  modified_base 17: mod_base = OTHER; note = uracil
  source 1..25: mol_type = other DNA
tgccagatgtgtctgctacagactt

SEQ ID NO: 102 - RNA, 25 nt, synthetic construct
  misc_feature 1..25: note = synthetic construct
  source 1..25: mol_type = other RNA
cagatgtgtctgctacagactttga

SEQ ID NO: 103 - RNA, 25 nt, synthetic construct
  misc_feature 1..25: note = synthetic construct
  source 1..25: mol_type = other RNA
cagactttgagaaggttgatctgac

SEQ ID NO: 104 - RNA, 25 nt, synthetic construct
  misc_feature 1..25: note = synthetic construct
  source 1..25: mol_type = other RNA
gactttgagaaggttgatctgaccc

SEQ ID NO: 105 - RNA, 25 nt, synthetic construct
  misc_feature 1..25: note = synthetic construct
  source 1..25: mol_type = other RNA
actttgagaaggttgatctgaccca

SEQ ID NO: 106 - RNA, 25 nt, synthetic construct
  misc_feature 1..25: note = synthetic construct
  source 1..25: mol_type = other RNA
ctttgagaaggttgatctgacccag

SEQ ID NO: 107 - DNA, 25 bp, synthetic construct
  misc_feature 1..25: note = synthetic construct
  modified_base 1..3: mod_base = OTHER; note = uracil
  modified_base 11..12: mod_base = OTHER; note = uracil
  modified_base 15: mod_base = OTHER; note = uracil
  modified_base 17: mod_base = OTHER; note = uracil
  source 1..25: mol_type = other DNA
tttgagaaggttgatctgacccagt

SEQ ID NO: 108 - DNA, 25 bp, synthetic construct
  misc_feature 1..25: note = synthetic construct
  modified_base 1..2: mod_base = OTHER; note = uracil
  modified_base 10..11: mod_base = OTHER; note = uracil
  modified_base 14: mod_base = OTHER; note = uracil
  modified_base 16: mod_base = OTHER; note = uracil
  source 1..25: mol_type = other DNA
ttgagaaggttgatctgacccagtt

SEQ ID NO: 109 - DNA, 25 bp, synthetic construct
  misc_feature 1..25: note = synthetic construct
  modified_base 1: mod_base = OTHER; note = uracil
  modified_base 9..10: mod_base = OTHER; note = uracil
  modified_base 13: mod_base = OTHER; note = uracil
  modified_base 15: mod_base = OTHER; note = uracil
  modified_base 23: mod_base = OTHER; note = uracil
  source 1..25: mol_type = other DNA
tgagaaggttgatctgacccagttc

SEQ ID NO: 110 - RNA, 25 nt, synthetic construct
  misc_feature 1..25: note = synthetic construct
  source 1..25: mol_type = other RNA
gagaaggttgatctgacccagttca

SEQ ID NO: 111 - RNA, 25 nt, synthetic construct
  misc_feature 1..25: note = synthetic construct
  source 1..25: mol_type = other RNA
agaaggttgatctgacccagttcaa

SEQ ID NO: 112 - RNA, 25 nt, synthetic construct
  misc_feature 1..25: note = synthetic construct
  source 1..25: mol_type = other RNA
gaaggttgatctgacccagttcaag

SEQ ID NO: 113 - DNA, 25 bp, synthetic construct
  misc_feature 1..25: note = synthetic construct
  modified_base 5..6: mod_base = OTHER; note = uracil
  modified_base 9: mod_base = OTHER; note = uracil
  modified_base 11: mod_base = OTHER; note = uracil
  modified_base 19..20: mod_base = OTHER; note = uracil
  source 1..25: mol_type = other DNA
aaggttgatctgacccagttcaagt

SEQ ID NO: 114 - DNA, 25 bp, synthetic construct
  misc_feature 1..25: note = synthetic construct
  modified_base 4..5: mod_base = OTHER; note = uracil
  modified_base 8: mod_base = OTHER; note = uracil
  modified_base 10: mod_base = OTHER; note = uracil
  modified_base 18..19: mod_base = OTHER; note = uracil
  source 1..25: mol_type = other DNA
aggttgatctgacccagttcaagtg

SEQ ID NO: 115 - RNA, 25 nt, synthetic construct
  misc_feature 1..25: note = synthetic construct
  source 1..25: mol_type = other RNA
ggttgatctgacccagttcaagtgg

SEQ ID NO: 116 - RNA, 25 nt, synthetic construct
  misc_feature 1..25: note = synthetic construct
  source 1..25: mol_type = other RNA
gttgatctgacccagttcaagtgga

SEQ ID NO: 117 - DNA, 25 bp, synthetic construct
  misc_feature 1..25: note = synthetic construct
  modified_base 1..2: mod_base = OTHER; note = uracil
  modified_base 5: mod_base = OTHER; note = uracil
  modified_base 7: mod_base = OTHER; note = uracil
  modified_base 15..16: mod_base = OTHER; note = uracil
  modified_base 21: mod_base = OTHER; note = uracil
  source 1..25: mol_type = other DNA
ttgatctgacccagttcaagtggat

SEQ ID NO: 118 - DNA, 25 bp, synthetic construct
  misc_feature 1..25: note = synthetic construct
  modified_base 1: mod_base = OTHER; note = uracil
  modified_base 4: mod_base = OTHER; note = uracil
  modified_base 6: mod_base = OTHER; note = uracil
  modified_base 14..15: mod_base = OTHER; note = uracil
  modified_base 20: mod_base = OTHER; note = uracil
  source 1..25: mol_type = other DNA
tgatctgacccagttcaagtggatc

SEQ ID NO: 119 - RNA, 25 nt, synthetic construct
  misc_feature 1..25: note = synthetic construct
  source 1..25: mol_type = other RNA
gatctgacccagttcaagtggatcc

SEQ ID NO: 120 - RNA, 25 nt, synthetic construct
  misc_feature 1..25: note = synthetic construct
  source 1..25: mol_type = other RNA
atctgacccagttcaagtggatcca

SEQ ID NO: 121 - RNA, 25 nt, synthetic construct
  misc_feature 1..25: note = synthetic construct
  source 1..25: mol_type = other RNA
tctgacccagttcaagtggatccac

SEQ ID NO: 122 - RNA, 25 nt, synthetic construct
  misc_feature 1..25: note = synthetic construct
  source 1..25: mol_type = other RNA
ctgacccagttcaagtggatccaca

SEQ ID NO: 123 - DNA, 25 bp, synthetic construct
  misc_feature 1..25: note = synthetic construct
  modified_base 1: mod_base = OTHER; note = uracil
  modified_base 9..10: mod_base = OTHER; note = uracil
  modified_base 15: mod_base = OTHER; note = uracil
  modified_base 19: mod_base = OTHER; note = uracil
  source 1..25: mol_type = other DNA
tgacccagttcaagtggatccacat

SEQ ID NO: 124 - DNA, 25 bp, synthetic construct
  misc_feature 1..25: note = synthetic construct
  modified_base 8..9: mod_base = OTHER; note = uracil
  modified_base 14: mod_base = OTHER; note = uracil
  modified_base 18: mod_base = OTHER; note = uracil
  source 1..25: mol_type = other DNA
gacccagttcaagtggatccacatt

SEQ ID NO: 125 - DNA, 25 bp, synthetic construct
  misc_feature 1..25: note = synthetic construct
  modified_base 7..8: mod_base = OTHER; note = uracil
  modified_base 13: mod_base = OTHER; note = uracil
  modified_base 17: mod_base = OTHER; note = uracil
  modified_base 23: mod_base = OTHER; note = uracil
  source 1..25: mol_type = other DNA
acccagttcaagtggatccacattg

SEQ ID NO: 126 - RNA, 25 nt, synthetic construct
  misc_feature 1..25: note = synthetic construct
  source 1..25: mol_type = other RNA
cccagttcaagtggatccacattga

SEQ ID NO: 127 - RNA, 25 nt, synthetic construct
  misc_feature 1..25: note = synthetic construct
  source 1..25: mol_type = other RNA
ccagttcaagtggatccacattgag

SEQ ID NO: 128 - RNA, 25 nt, synthetic construct
  misc_feature 1..25: note = synthetic construct
  source 1..25: mol_type = other RNA
cagttcaagtggatccacattgagg

SEQ ID NO: 129 - RNA, 25 nt, synthetic construct
  misc_feature 1..25: note = synthetic construct
  source 1..25: mol_type = other RNA
agttcaagtggatccacattgaggg

SEQ ID NO: 130 - RNA, 25 nt, synthetic construct
  misc_feature 1..25: note = synthetic construct
  source 1..25: mol_type = other RNA
gttcaagtggatccacattgagggc

SEQ ID NO: 131 - RNA, 25 nt, synthetic construct
  misc_feature 1..25: note = synthetic construct
  source 1..25: mol_type = other RNA
ttcaagtggatccacattgagggcc

SEQ ID NO: 132 - RNA, 25 nt, synthetic construct
  misc_feature 1..25: note = synthetic construct
  source 1..25: mol_type = other RNA
tcaagtggatccacattgagggccg

SEQ ID NO: 133 - RNA, 25 nt, synthetic construct
  misc_feature 1..25: note = synthetic construct
  source 1..25: mol_type = other RNA
caagtggatccacattgagggccgg

SEQ ID NO: 134 - RNA, 25 nt, synthetic construct
  misc_feature 1..25: note = synthetic construct
  source 1..25: mol_type = other RNA
aagtggatccacattgagggccgga

SEQ ID NO: 135 - RNA, 25 nt, synthetic construct
  misc_feature 1..25: note = synthetic construct
  source 1..25: mol_type = other RNA
agtggatccacattgagggccggaa

SEQ ID NO: 136 - RNA, 25 nt, synthetic construct
  misc_feature 1..25: note = synthetic construct
  source 1..25: mol_type = other RNA
gtggatccacattgagggccggaac

SEQ ID NO: 137 - RNA, 25 nt, synthetic construct
  misc_feature 1..25: note = synthetic construct
  source 1..25: mol_type = other RNA
gcatcggagcaggtgaagatgctgc

SEQ ID NO: 138 - RNA, 25 nt, synthetic construct
  misc_feature 1..25: note = synthetic construct
  source 1..25: mol_type = other RNA
catcggagcaggtgaagatgctgca

SEQ ID NO: 139 - RNA, 25 nt, synthetic construct
  misc_feature 1..25: note = synthetic construct
  source 1..25: mol_type = other RNA
atcggagcaggtgaagatgctgcag

SEQ ID NO: 140 - RNA, 25 nt, synthetic construct
  misc_feature 1..25: note = synthetic construct
  source 1..25: mol_type = other RNA
tcggagcaggtgaagatgctgcagc

SEQ ID NO: 141 - RNA, 25 nt, synthetic construct
  misc_feature 1..25: note = synthetic construct
  source 1..25: mol_type = other RNA
cggagcaggtgaagatgctgcagcg

SEQ ID NO: 142 - RNA, 25 nt, synthetic construct
  misc_feature 1..25: note = synthetic construct
  source 1..25: mol_type = other RNA
ggagcaggtgaagatgctgcagcgg

SEQ ID NO: 143 - RNA, 25 nt, synthetic construct
  misc_feature 1..25: note = synthetic construct
  source 1..25: mol_type = other RNA
gagcaggtgaagatgctgcagcgga

SEQ ID NO: 144 - DNA, 25 bp, synthetic construct
  misc_feature 1..25: note = synthetic construct
  modified_base 7: mod_base = OTHER; note = uracil
  modified_base 13: mod_base = OTHER; note = uracil
  modified_base 16: mod_base = OTHER; note = uracil
  source 1..25: mol_type = other DNA
agcaggtgaagatgctgcagcggat

SEQ ID NO: 145 - DNA, 25 bp, synthetic construct
  misc_feature 1..25: note = synthetic construct
  modified_base 6: mod_base = OTHER; note = uracil
  modified_base 12: mod_base = OTHER; note = uracil
  modified_base 15: mod_base = OTHER; note = uracil
  source 1..25: mol_type = other DNA
gcaggtgaagatgctgcagcggata

SEQ ID NO: 146 - RNA, 25 nt, synthetic construct
  misc_feature 1..25: note = synthetic construct
  source 1..25: mol_type = other RNA
caggtgaagatgctgcagcggatag

SEQ ID NO: 147 - RNA, 25 nt, synthetic construct
  misc_feature 1..25: note = synthetic construct
  source 1..25: mol_type = other RNA
aggtgaagatgctgcagcggataga

SEQ ID NO: 148 - RNA, 25 nt, synthetic construct
  misc_feature 1..25: note = synthetic construct
  source 1..25: mol_type = other RNA
ggtgaagatgctgcagcggatagac

SEQ ID NO: 149 - RNA, 25 nt, synthetic construct
  misc_feature 1..25: note = synthetic construct
  source 1..25: mol_type = other RNA
gtgaagatgctgcagcggatagacg

SEQ ID NO: 150 - RNA, 25 nt, synthetic construct
  misc_feature 1..25: note = synthetic construct
  source 1..25: mol_type = other RNA
tgaagatgctgcagcggatagacgc

SEQ ID NO: 151 - RNA, 25 nt, synthetic construct
  misc_feature 1..25: note = synthetic construct
  source 1..25: mol_type = other RNA
gaagatgctgcagcggatagacgca

SEQ ID NO: 152 - RNA, 25 nt, synthetic construct
  misc_feature 1..25: note = synthetic construct
  source 1..25: mol_type = other RNA
aagatgctgcagcggatagacgcac

SEQ ID NO: 153 - RNA, 25 nt, synthetic construct
  misc_feature 1..25: note = synthetic construct
  source 1..25: mol_type = other RNA
agatgctgcagcggatagacgcaca

SEQ ID NO: 154 - RNA, 25 nt, synthetic construct
  misc_feature 1..25: note = synthetic construct
  source 1..25: mol_type = other RNA
gatgctgcagcggatagacgcacac

SEQ ID NO: 155 - RNA, 25 nt, synthetic construct
  misc_feature 1..25: note = synthetic construct
  source 1..25: mol_type = other RNA
atgctgcagcggatagacgcacaca

SEQ ID NO: 156 - RNA, 25 nt, synthetic construct
  misc_feature 1..25: note = synthetic construct
  source 1..25: mol_type = other RNA
tgctgcagcggatagacgcacacaa

SEQ ID NO: 157 - RNA, 25 nt, synthetic construct
  misc_feature 1..25: note = synthetic construct
  source 1..25: mol_type = other RNA
cacaacaccaggcagcctccagagc

SEQ ID NO: 158 - RNA, 25 nt, synthetic construct
  misc_feature 1..25: note = synthetic construct
  source 1..25: mol_type = other RNA
acaccaggcagcctccagagcagaa

SEQ ID NO: 159 - RNA, 25 nt, synthetic construct
  misc_feature 1..25: note = synthetic construct
  source 1..25: mol_type = other RNA
caccaggcagcctccagagcagaag

SEQ ID NO: 160 - RNA, 25 nt, synthetic construct
  misc_feature 1..25: note = synthetic construct
  source 1..25: mol_type = other RNA
accaggcagcctccagagcagaaga

SEQ ID NO: 161 - DNA, 25 bp, synthetic construct
  misc_feature 1..25: note = synthetic construct
  modified_base 11: mod_base = OTHER; note = uracil
  source 1..25: mol_type = other DNA
ccaggcagcctccagagcagaagat

SEQ ID NO: 162 - DNA, 25 bp, synthetic construct
  misc_feature 1..25: note = synthetic construct
  modified_base 5: mod_base = OTHER; note = uracil
  modified_base 19: mod_base = OTHER; note = uracil
  source 1..25: mol_type = other DNA
agcctccagagcagaagatccgggt

SEQ ID NO: 163 - DNA, 25 bp, synthetic construct
  misc_feature 1..25: note = synthetic construct
  modified_base 4: mod_base = OTHER; note = uracil
  modified_base 18: mod_base = OTHER; note = uracil
  source 1..25: mol_type = other DNA
gcctccagagcagaagatccgggtg

SEQ ID NO: 164 - DNA, 25 bp, synthetic construct
  misc_feature 1..25: note = synthetic construct
  modified_base 3: mod_base = OTHER; note = uracil
  modified_base 17: mod_base = OTHER; note = uracil
  modified_base 23: mod_base = OTHER; note = uracil
  source 1..25: mol_type = other DNA
cctccagagcagaagatccgggtgt

SEQ ID NO: 165 - RNA, 25 nt, synthetic construct
  misc_feature 1..25: note = synthetic construct
  source 1..25: mol_type = other RNA
gagcagaagatccgggtgtccgtgg

SEQ ID NO: 166 - RNA, 25 nt, synthetic construct
  misc_feature 1..25: note = synthetic construct
  source 1..25: mol_type = other RNA
agcagaagatccgggtgtccgtgga

SEQ ID NO: 167 - RNA, 25 nt, synthetic construct
  misc_feature 1..25: note = synthetic construct
  source 1..25: mol_type = other RNA
cgtggaggtggagaagccacgagag

SEQ ID NO: 168 - DNA, 25 bp, synthetic construct
  misc_feature 1..25: note = synthetic construct
  modified_base 4: mod_base = OTHER; note = uracil
  modified_base 6..8: mod_base = OTHER; note = uracil
  modified_base 12: mod_base = OTHER; note = uracil
  modified_base 22: mod_base = OTHER; note = uracil
  source 1..25: mol_type = other DNA
agctgtttggctacggagacgtggt

SEQ ID NO: 169 - DNA, 25 bp, synthetic construct
  misc_feature 1..25: note = synthetic construct
  modified_base 3: mod_base = OTHER; note = uracil
  modified_base 5..7: mod_base = OTHER; note = uracil
  modified_base 11: mod_base = OTHER; note = uracil
  modified_base 21: mod_base = OTHER; note = uracil
  source 1..25: mol_type = other DNA
gctgtttggctacggagacgtggtg

SEQ ID NO: 170 - DNA, 25 bp, synthetic construct
  misc_feature 1..25: note = synthetic construct
  modified_base 1: mod_base = OTHER; note = uracil
  modified_base 3..5: mod_base = OTHER; note = uracil
  modified_base 9: mod_base = OTHER; note = uracil
  modified_base 19: mod_base = OTHER; note = uracil
  modified_base 22: mod_base = OTHER; note = uracil
  source 1..25: mol_type = other DNA
tgtttggctacggagacgtggtgtt

SEQ ID NO: 171 - DNA, 25 bp, synthetic construct
  misc_feature 1..25: note = synthetic construct
  modified_base 2..4: mod_base = OTHER; note = uracil
  modified_base 8: mod_base = OTHER; note = uracil
  modified_base 18: mod_base = OTHER; note = uracil
  modified_base 21: mod_base = OTHER; note = uracil
  modified_base 23: mod_base = OTHER; note = uracil
  source 1..25: mol_type = other DNA
gtttggctacggagacgtggtgttt

SEQ ID NO: 172 - DNA, 25 bp, synthetic construct
  misc_feature 1..25: note = synthetic construct
  modified_base 1..3: mod_base = OTHER; note = uracil
  modified_base 7: mod_base = OTHER; note = uracil
  modified_base 17: mod_base = OTHER; note = uracil
  modified_base 20: mod_base = OTHER; note = uracil
  modified_base 22..23: mod_base = OTHER; note = uracil
  source 1..25: mol_type = other DNA
tttggctacggagacgtggtgtttg

SEQ ID NO: 173 - DNA, 25 bp, synthetic construct
  misc_feature 1..25: note = synthetic construct
  modified_base 1..2: mod_base = OTHER; note = uracil
  modified_base 6: mod_base = OTHER; note = uracil
  modified_base 16: mod_base = OTHER; note = uracil
  modified_base 19: mod_base = OTHER; note = uracil
  modified_base 21..23: mod_base = OTHER; note = uracil
  source 1..25: mol_type = other DNA
ttggctacggagacgtggtgtttgt

SEQ ID NO: 174 - DNA, 25 bp, synthetic construct
  misc_feature 1..25: note = synthetic construct
  modified_base 1: mod_base = OTHER; note = uracil
  modified_base 5: mod_base = OTHER; note = uracil
  modified_base 15: mod_base = OTHER; note = uracil
  modified_base 18: mod_base = OTHER; note = uracil
  modified_base 20..22: mod_base = OTHER; note = uracil
  source 1..25: mol_type = other DNA
tggctacggagacgtggtgtttgtc

SEQ ID NO: 175 - RNA, 25 nt, synthetic construct
  misc_feature 1..25: note = synthetic construct
  source 1..25: mol_type = other RNA
ggctacggagacgtggtgtttgtca

SEQ ID NO: 176 - RNA, 25 nt, synthetic construct
  misc_feature 1..25: note = synthetic construct
  source 1..25: mol_type = other RNA
gctacggagacgtggtgtttgtcag

SEQ ID NO: 177 - RNA, 25 nt, synthetic construct
  misc_feature 1..25: note = synthetic construct
  source 1..25: mol_type = other RNA
ctacggagacgtggtgtttgtcagc

SEQ ID NO: 178 - RNA, 25 nt, synthetic construct
  misc_feature 1..25: note = synthetic construct
  source 1..25: mol_type = other RNA
tacggagacgtggtgtttgtcagca

SEQ ID NO: 179 - RNA, 25 nt, synthetic construct
  misc_feature 1..25: note = synthetic construct
  source 1..25: mol_type = other RNA
acggagacgtggtgtttgtcagcaa

SEQ ID NO: 180 - RNA, 25 nt, synthetic construct
  misc_feature 1..25: note = synthetic construct
  source 1..25: mol_type = other RNA
cggagacgtggtgtttgtcagcaaa

SEQ ID NO: 181 - RNA, 25 nt, synthetic construct
  misc_feature 1..25: note = synthetic construct
  source 1..25: mol_type = other RNA
ggagacgtggtgtttgtcagcaaag

SEQ ID NO: 182 - RNA, 25 nt, synthetic construct
  misc_feature 1..25: note = synthetic construct
  source 1..25: mol_type = other RNA
gagacgtggtgtttgtcagcaaaga

SEQ ID NO: 183 - DNA, 25 bp, synthetic construct
  misc_feature 1..25: note = synthetic construct
  modified_base 6: mod_base = OTHER; note = uracil
  modified_base 9: mod_base = OTHER; note = uracil
  modified_base 11..13: mod_base = OTHER; note = uracil
  modified_base 15: mod_base = OTHER; note = uracil
  source 1..25: mol_type = other DNA
agacgtggtgtttgtcagcaaagat

SEQ ID NO: 184 - DNA, 25 bp, synthetic construct
  misc_feature 1..25: note = synthetic construct
  modified_base 5: mod_base = OTHER; note = uracil
  modified_base 8: mod_base = OTHER; note = uracil
  modified_base 10..12: mod_base = OTHER; note = uracil
  modified_base 14: mod_base = OTHER; note = uracil
  source 1..25: mol_type = other DNA
gacgtggtgtttgtcagcaaagatg

SEQ ID NO: 185 - DNA, 25 bp, synthetic construct
  misc_feature 1..25: note = synthetic construct
  modified_base 4: mod_base = OTHER; note = uracil
  modified_base 7: mod_base = OTHER; note = uracil
  modified_base 9..11: mod_base = OTHER; note = uracil
  modified_base 13: mod_base = OTHER; note = uracil
  modified_base 23: mod_base = OTHER; note = uracil
  source 1..25: mol_type = other DNA
acgtggtgtttgtcagcaaagatgt

SEQ ID NO: 186 - DNA, 25 bp, synthetic construct
  misc_feature 1..25: note = synthetic construct
  modified_base 3: mod_base = OTHER; note = uracil
  modified_base 6: mod_base = OTHER; note = uracil
  modified_base 8..10: mod_base = OTHER; note = uracil
  modified_base 12: mod_base = OTHER; note = uracil
  modified_base 22: mod_base = OTHER; note = uracil
  source 1..25: mol_type = other DNA
cgtggtgtttgtcagcaaagatgtg

SEQ ID NO: 187 - RNA, 25 nt, synthetic construct
  misc_feature 1..25: note = synthetic construct
  source 1..25: mol_type = other RNA
gtggtgtttgtcagcaaagatgtgg

SEQ ID NO: 188 - RNA, 25 nt, synthetic construct
  misc_feature 1..25: note = synthetic construct
  source 1..25: mol_type = other RNA
tggtgtttgtcagcaaagatgtggc

SEQ ID NO: 189 - RNA, 25 nt, synthetic construct
  misc_feature 1..25: note = synthetic construct
  source 1..25: mol_type = other RNA
ggtgtttgtcagcaaagatgtggcc

SEQ ID NO: 190 - RNA, 25 nt, synthetic construct
  misc_feature 1..25: note = synthetic construct
  source 1..25: mol_type = other RNA
gtgtttgtcagcaaagatgtggcca

SEQ ID NO: 191 - RNA, 25 nt, synthetic construct
  misc_feature 1..25: note = synthetic construct
  source 1..25: mol_type = other RNA
tgtttgtcagcaaagatgtggccaa

SEQ ID NO: 192 - RNA, 25 nt, synthetic construct
  misc_feature 1..25: note = synthetic construct
  source 1..25: mol_type = other RNA
gtttgtcagcaaagatgtggccaag

SEQ ID NO: 193 - RNA, 25 nt, synthetic construct
  misc_feature 1..25: note = synthetic construct
  source 1..25: mol_type = other RNA
tttgtcagcaaagatgtggccaagc

SEQ ID NO: 194 - RNA, 25 nt, synthetic construct
  misc_feature 1..25: note = synthetic construct
  source 1..25: mol_type = other RNA
ttgtcagcaaagatgtggccaagca

SEQ ID NO: 195 - RNA, 25 nt, synthetic construct
  misc_feature 1..25: note = synthetic construct
  source 1..25: mol_type = other RNA
tgtcagcaaagatgtggccaagcac

SEQ ID NO: 196 - DNA, 25 bp, synthetic construct
  misc_feature 1..25: note = synthetic construct
  modified_base 2: mod_base = OTHER; note = uracil
  modified_base 12: mod_base = OTHER; note = uracil
  modified_base 14: mod_base = OTHER; note = uracil
  source 1..25: mol_type = other DNA
gtcagcaaagatgtggccaagcact

SEQ ID NO: 197 - DNA, 25 bp, synthetic construct
  misc_feature 1..25: note = synthetic construct
  modified_base 1: mod_base = OTHER; note = uracil
  modified_base 11: mod_base = OTHER; note = uracil
  modified_base 13: mod_base = OTHER; note = uracil
  source 1..25: mol_type = other DNA
tcagcaaagatgtggccaagcactt

SEQ ID NO: 198 - DNA, 25 bp, synthetic construct
  misc_feature 1..25: note = synthetic construct
  modified_base 10: mod_base = OTHER; note = uracil
  modified_base 12: mod_base = OTHER; note = uracil
  modified_base 23: mod_base = OTHER; note = uracil
  source 1..25: mol_type = other DNA
cagcaaagatgtggccaagcacttg

SEQ ID NO: 199 - RNA, 25 nt, synthetic construct
  misc_feature 1..25: note = synthetic construct
  source 1..25: mol_type = other RNA
agcaaagatgtggccaagcacttgg

SEQ ID NO: 200 - RNA, 25 nt, synthetic construct
  misc_feature 1..25: note = synthetic construct
  source 1..25: mol_type = other RNA
gcaaagatgtggccaagcacttggg

SEQ ID NO: 201 - DNA, 25 bp, synthetic construct
  misc_feature 1..25: note = synthetic construct
  modified_base 5: mod_base = OTHER; note = uracil
  modified_base 7: mod_base = OTHER; note = uracil
  modified_base 18..19: mod_base = OTHER; note = uracil
  source 1..25: mol_type = other DNA
aagatgtggccaagcacttggggtt

SEQ ID NO: 202 - DNA, 25 bp, synthetic construct
  misc_feature 1..25: note = synthetic construct
  modified_base 4: mod_base = OTHER; note = uracil
  modified_base 6: mod_base = OTHER; note = uracil
  modified_base 17..18: mod_base = OTHER; note = uracil
  modified_base 23: mod_base = OTHER; note = uracil
  source 1..25: mol_type = other DNA
agatgtggccaagcacttggggttc

SEQ ID NO: 203 - RNA, 25 nt, synthetic construct
  misc_feature 1..25: note = synthetic construct
  source 1..25: mol_type = other RNA
gatgtggccaagcacttggggttcc

SEQ ID NO: 204 - RNA, 25 nt, synthetic construct
  misc_feature 1..25: note = synthetic construct
  source 1..25: mol_type = other RNA
atgtggccaagcacttggggttcca

SEQ ID NO: 205 - DNA, 25 bp, synthetic construct
  misc_feature 1..25: note = synthetic construct
  modified_base 2: mod_base = OTHER; note = uracil
  modified_base 13..14: mod_base = OTHER; note = uracil
  modified_base 19..20: mod_base = OTHER; note = uracil
  source 1..25: mol_type = other DNA
gtggccaagcacttggggttccagt

SEQ ID NO: 206 - DNA, 25 bp, synthetic construct
  misc_feature 1..25: note = synthetic construct
  modified_base 1: mod_base = OTHER; note = uracil
  modified_base 12..13: mod_base = OTHER; note = uracil
  modified_base 18..19: mod_base = OTHER; note = uracil
  source 1..25: mol_type = other DNA
tggccaagcacttggggttccagtc

SEQ ID NO: 207 - RNA, 25 nt, synthetic construct
  misc_feature 1..25: note = synthetic construct
  source 1..25: mol_type = other RNA
ggccaagcacttggggttccagtca

SEQ ID NO: 208 - RNA, 25 nt, synthetic construct
  misc_feature 1..25: note = synthetic construct
  source 1..25: mol_type = other RNA
ccaagcacttggggttccagtcagc

SEQ ID NO: 209 - RNA, 25 nt, synthetic construct
  misc_feature 1..25: note = synthetic construct
  source 1..25: mol_type = other RNA
caagcacttggggttccagtcagca

SEQ ID NO: 210 - RNA, 25 nt, synthetic construct
  misc_feature 1..25: note = synthetic construct
  source 1..25: mol_type = other RNA
aagcacttggggttccagtcagcag

SEQ ID NO: 211 - RNA, 25 nt, synthetic construct
  misc_feature 1..25: note = synthetic construct
  source 1..25: mol_type = other RNA
agcacttggggttccagtcagcaga

SEQ ID NO: 212 - RNA, 25 nt, synthetic construct
  misc_feature 1..25: note = synthetic construct
  source 1..25: mol_type = other RNA
gcacttggggttccagtcagcagag

SEQ ID NO: 213 - RNA, 25 nt, synthetic construct
  misc_feature 1..25: note = synthetic construct
  source 1..25: mol_type = other RNA
cacttggggttccagtcagcagagg

SEQ ID NO: 214 - RNA, 25 nt, synthetic construct
  misc_feature 1..25: note = synthetic construct
  source 1..25: mol_type = other RNA
cttggggttccagtcagcagaggaa

SEQ ID NO: 215 - RNA, 25 nt, synthetic construct
  misc_feature 1..25: note = synthetic construct
  source 1..25: mol_type = other RNA
ttggggttccagtcagcagaggaag

SEQ ID NO: 216 - RNA, 25 nt, synthetic construct
  misc_feature 1..25: note = synthetic construct
  source 1..25: mol_type = other RNA
tgaggggcttgtatggtcgtgtgag

SEQ ID NO: 217 - RNA, 25 nt, synthetic construct
  misc_feature 1..25: note = synthetic construct
  source 1..25: mol_type = other RNA
gaggggcttgtatggtcgtgtgagg

SEQ ID NO: 218 - RNA, 25 nt, synthetic construct
  misc_feature 1..25: note = synthetic construct
  source 1..25: mol_type = other RNA
aggggcttgtatggtcgtgtgagga

SEQ ID NO: 219 - RNA, 25 nt, synthetic construct
  misc_feature 1..25: note = synthetic construct
  source 1..25: mol_type = other RNA
ggggcttgtatggtcgtgtgaggaa

SEQ ID NO: 220 - RNA, 25 nt, synthetic construct
  misc_feature 1..25: note = synthetic construct
  source 1..25: mol_type = other RNA
gggcttgtatggtcgtgtgaggaaa

SEQ ID NO: 221 - RNA, 25 nt, synthetic construct
  misc_feature 1..25: note = synthetic construct
  source 1..25: mol_type = other RNA
ggcttgtatggtcgtgtgaggaaag

SEQ ID NO: 222 - RNA, 25 nt, synthetic construct
  misc_feature 1..25: note = synthetic construct
  source 1..25: mol_type = other RNA
gcttgtatggtcgtgtgaggaaagg

SEQ ID NO: 223 - RNA, 25 nt, synthetic construct
  misc_feature 1..25: note = synthetic construct
  source 1..25: mol_type = other RNA
cttgtatggtcgtgtgaggaaaggg

SEQ ID NO: 224 - RNA, 25 nt, synthetic construct
  misc_feature 1..25: note = synthetic construct
  source 1..25: mol_type = other RNA
ttgtatggtcgtgtgaggaaagggg

SEQ ID NO: 225 - RNA, 25 nt, synthetic construct
  misc_feature 1..25: note = synthetic construct
  source 1..25: mol_type = other RNA
tgtatggtcgtgtgaggaaaggggc

SEQ ID NO: 226 - DNA, 25 bp, synthetic construct
  misc_feature 1..25: note = synthetic construct
  modified_base 2: mod_base = OTHER; note = uracil
  modified_base 4: mod_base = OTHER; note = uracil
  modified_base 7: mod_base = OTHER; note = uracil
  modified_base 10: mod_base = OTHER; note = uracil
  modified_base 12: mod_base = OTHER; note = uracil
  source 1..25: mol_type = other DNA
gtatggtcgtgtgaggaaaggggct

SEQ ID NO: 227 - DNA, 25 bp, synthetic construct
  misc_feature 1..25: note = synthetic construct
  modified_base 1: mod_base = OTHER; note = uracil
  modified_base 3: mod_base = OTHER; note = uracil
  modified_base 6: mod_base = OTHER; note = uracil
  modified_base 9: mod_base = OTHER; note = uracil
  modified_base 11: mod_base = OTHER; note = uracil
  source 1..25: mol_type = other DNA
tatggtcgtgtgaggaaaggggctg

SEQ ID NO: 228 - DNA, 25 bp, synthetic construct
  misc_feature 1..25: note = synthetic construct
  modified_base 2: mod_base = OTHER; note = uracil
  modified_base 5: mod_base = OTHER; note = uracil
  modified_base 8: mod_base = OTHER; note = uracil
  modified_base 10: mod_base = OTHER; note = uracil
  modified_base 23: mod_base = OTHER; note = uracil
  source 1..25: mol_type = other DNA
atggtcgtgtgaggaaaggggctgt

SEQ ID NO: 229 - DNA, 25 bp, synthetic construct
  misc_feature 1..25: note = synthetic construct
  modified_base 1: mod_base = OTHER; note = uracil
  modified_base 4: mod_base = OTHER; note = uracil
  modified_base 7: mod_base = OTHER; note = uracil
  modified_base 9: mod_base = OTHER; note = uracil
  modified_base 22: mod_base = OTHER; note = uracil
  source 1..25: mol_type = other DNA
tggtcgtgtgaggaaaggggctgtg

SEQ ID NO: 230 - RNA, 25 nt, synthetic construct
  misc_feature 1..25: note = synthetic construct
  source 1..25: mol_type = other RNA
ggtcgtgtgaggaaaggggctgtgc

SEQ ID NO: 231 - DNA, 25 bp, synthetic construct
  misc_feature 1..25: note = synthetic construct
  modified_base 2: mod_base = OTHER; note = uracil
  modified_base 4: mod_base = OTHER; note = uracil
  modified_base 17: mod_base = OTHER; note = uracil
  modified_base 19: mod_base = OTHER; note = uracil
  modified_base 22..23: mod_base = OTHER; note = uracil
  source 1..25: mol_type = other DNA
gtgtgaggaaaggggctgtgcttgt

SEQ ID NO: 232 - DNA, 25 bp, synthetic construct
  misc_feature 1..25: note = synthetic construct
  modified_base 1: mod_base = OTHER; note = uracil
  modified_base 3: mod_base = OTHER; note = uracil
  modified_base 16: mod_base = OTHER; note = uracil
  modified_base 18: mod_base = OTHER; note = uracil
  modified_base 21..22: mod_base = OTHER; note = uracil
  source 1..25: mol_type = other DNA
tgtgaggaaaggggctgtgcttgtc

SEQ ID NO: 233 - DNA, 25 bp, synthetic construct
  misc_feature 1..25: note = synthetic construct
  modified_base 13: mod_base = OTHER; note = uracil
  modified_base 15: mod_base = OTHER; note = uracil
  modified_base 18..19: mod_base = OTHER; note = uracil
  modified_base 21: mod_base = OTHER; note = uracil
  modified_base 23: mod_base = OTHER; note = uracil
  source 1..25: mol_type = other DNA
gaggaaaggggctgtgcttgtctgt

SEQ ID NO: 234 - DNA, 25 bp, synthetic construct
  misc_feature 1..25: note = synthetic construct
  modified_base 12: mod_base = OTHER; note = uracil
  modified_base 14: mod_base = OTHER; note = uracil
  modified_base 17..18: mod_base = OTHER; note = uracil
  modified_base 20: mod_base = OTHER; note = uracil
  modified_base 22: mod_base = OTHER; note = uracil
  source 1..25: mol_type = other DNA
aggaaaggggctgtgcttgtctgtg

SEQ ID NO: 235 - RNA, 25 nt, synthetic construct
  misc_feature 1..25: note = synthetic construct
  source 1..25: mol_type = other RNA
ggaaaggggctgtgcttgtctgtgc

SEQ ID NO: 236 - DNA, 25 bp, synthetic construct
  misc_feature 1..25: note = synthetic construct
  modified_base 9: mod_base = OTHER; note = uracil
  modified_base 11: mod_base = OTHER; note = uracil
  modified_base 14..15: mod_base = OTHER; note = uracil
  modified_base 17: mod_base = OTHER; note = uracil
  modified_base 19: mod_base = OTHER; note = uracil
  modified_base 21: mod_base = OTHER; note = uracil
  source 1..25: mol_type = other DNA
aaaggggctgtgcttgtctgtgcct

SEQ ID NO: 237 - RNA, 25 nt, synthetic construct
  misc_feature 1..25: note = synthetic construct
  source 1..25: mol_type = other RNA
aggggctgtgcttgtctgtgcctgg

SEQ ID NO: 238 - RNA, 25 nt, synthetic construct
  misc_feature 1..25: note = synthetic construct
  source 1..25: mol_type = other RNA
ggggctgtgcttgtctgtgcctggg

SEQ ID NO: 239 - RNA, 25 nt, synthetic construct
  misc_feature 1..25: note = synthetic construct
  source 1..25: mol_type = other RNA
ccactcggatgctttcccgccaccc

SEQ ID NO: 240 - RNA, 25 nt, synthetic construct
  misc_feature 1..25: note = synthetic construct
  source 1..25: mol_type = other RNA
gctggagacaccttcaatgcctccg

SEQ ID NO: 241 - DNA, 25 bp, synthetic construct
  misc_feature 1..25: note = synthetic construct
  modified_base 2: mod_base = OTHER; note = uracil
  modified_base 12..13: mod_base = OTHER; note = uracil
  modified_base 17: mod_base = OTHER; note = uracil
  modified_base 21: mod_base = OTHER; note = uracil
  source 1..25: mol_type = other DNA
ctggagacaccttcaatgcctccgt

SEQ ID NO: 242 - DNA, 25 bp, synthetic construct
  misc_feature 1..25: note = synthetic construct
  modified_base 1: mod_base = OTHER; note = uracil
  modified_base 11..12: mod_base = OTHER; note = uracil
  modified_base 16: mod_base = OTHER; note = uracil
  modified_base 20: mod_base = OTHER; note = uracil
  source 1..25: mol_type = other DNA
tggagacaccttcaatgcctccgtc

SEQ ID NO: 243 - RNA, 25 nt, synthetic construct
  misc_feature 1..25: note = synthetic construct
  source 1..25: mol_type = other RNA
ggagacaccttcaatgcctccgtca

SEQ ID NO: 244 - DNA, 25 bp, synthetic construct
  misc_feature 1..25: note = synthetic construct
  modified_base 9..10: mod_base = OTHER; note = uracil
  modified_base 14: mod_base = OTHER; note = uracil
  modified_base 18: mod_base = OTHER; note = uracil
  modified_base 22: mod_base = OTHER; note = uracil
  source 1..25: mol_type = other DNA
gagacaccttcaatgcctccgtcat

SEQ ID NO: 245 - DNA, 25 bp, synthetic construct
  misc_feature 1..25: note = synthetic construct
  modified_base 8..9: mod_base = OTHER; note = uracil
  modified_base 13: mod_base = OTHER; note = uracil
  modified_base 17: mod_base = OTHER; note = uracil
  modified_base 21: mod_base = OTHER; note = uracil
  source 1..25: mol_type = other DNA
agacaccttcaatgcctccgtcatc

SEQ ID NO: 246 - DNA, 25 bp, synthetic construct
  misc_feature 1..25: note = synthetic construct
  modified_base 7..8: mod_base = OTHER; note = uracil
  modified_base 12: mod_base = OTHER; note = uracil
  modified_base 16: mod_base = OTHER; note = uracil
  modified_base 20: mod_base = OTHER; note = uracil
  modified_base 23: mod_base = OTHER; note = uracil
  source 1..25: mol_type = other DNA
gacaccttcaatgcctccgtcatct

SEQ ID NO: 247 - DNA, 25 bp, synthetic construct
  misc_feature 1..25: note = synthetic construct
  modified_base 6..7: mod_base = OTHER; note = uracil
  modified_base 11: mod_base = OTHER; note = uracil
  modified_base 15: mod_base = OTHER; note = uracil
  modified_base 19: mod_base = OTHER; note = uracil
  modified_base 22: mod_base = OTHER; note = uracil
  source 1..25: mol_type = other DNA
acaccttcaatgcctccgtcatctt

SEQ ID NO: 248 - DNA, 25 bp, synthetic construct
  misc_feature 1..25: note = synthetic construct
  modified_base 5..6: mod_base = OTHER; note = uracil
  modified_base 10: mod_base = OTHER; note = uracil
  modified_base 14: mod_base = OTHER; note = uracil
  modified_base 18: mod_base = OTHER; note = uracil
  modified_base 21: mod_base = OTHER; note = uracil
  modified_base 23: mod_base = OTHER; note = uracil
  source 1..25: mol_type = other DNA
caccttcaatgcctccgtcatcttc

SEQ ID NO: 249 - RNA, 25 nt, synthetic construct
  misc_feature 1..25: note = synthetic construct
  source 1..25: mol_type = other RNA
accttcaatgcctccgtcatcttca

SEQ ID NO: 250 - RNA, 25 nt, synthetic construct
  misc_feature 1..25: note = synthetic construct
  source 1..25: mol_type = other RNA
ccttcaatgcctccgtcatcttcag

SEQ ID NO: 251 - RNA, 25 nt, synthetic construct
  misc_feature 1..25: note = synthetic construct
  source 1..25: mol_type = other RNA
cttcaatgcctccgtcatcttcagc

SEQ ID NO: 252 - RNA, 25 nt, synthetic construct
  misc_feature 1..25: note = synthetic construct
  source 1..25: mol_type = other RNA
ttcaatgcctccgtcatcttcagcc

SEQ ID NO: 253 - DNA, 25 bp, synthetic construct
  misc_feature 1..25: note = synthetic construct
  modified_base 1: mod_base = OTHER; note = uracil
  modified_base 5: mod_base = OTHER; note = uracil
  modified_base 9: mod_base = OTHER; note = uracil
  modified_base 13: mod_base = OTHER; note = uracil
  modified_base 16: mod_base = OTHER; note = uracil
  modified_base 18..19: mod_base = OTHER; note = uracil
  source 1..25: mol_type = other DNA
tcaatgcctccgtcatcttcagcct

SEQ ID NO: 254 - DNA, 25 bp, synthetic construct
  misc_feature 1..25: note = synthetic construct
  modified_base 4: mod_base = OTHER; note = uracil
  modified_base 8: mod_base = OTHER; note = uracil
  modified_base 12: mod_base = OTHER; note = uracil
  modified_base 15: mod_base = OTHER; note = uracil
  modified_base 17..18: mod_base = OTHER; note = uracil
  source 1..25: mol_type = other DNA
caatgcctccgtcatcttcagcctc

SEQ ID NO: 255 - DNA, 25 bp, synthetic construct
  misc_feature 1..25: note = synthetic construct
  modified_base 3: mod_base = OTHER; note = uracil
  modified_base 7: mod_base = OTHER; note = uracil
  modified_base 11: mod_base = OTHER; note = uracil
  modified_base 14: mod_base = OTHER; note = uracil
  modified_base 16..17: mod_base = OTHER; note = uracil
  modified_base 23: mod_base = OTHER; note = uracil
  source 1..25: mol_type = other DNA
aatgcctccgtcatcttcagcctct

SEQ ID NO: 256 - DNA, 25 bp, synthetic construct
  misc_feature 1..25: note = synthetic construct
  modified_base 2: mod_base = OTHER; note = uracil
  modified_base 6: mod_base = OTHER; note = uracil
  modified_base 10: mod_base = OTHER; note = uracil
  modified_base 13: mod_base = OTHER; note = uracil
  modified_base 15..16: mod_base = OTHER; note = uracil
  modified_base 22: mod_base = OTHER; note = uracil
  source 1..25: mol_type = other DNA
atgcctccgtcatcttcagcctctc

SEQ ID NO: 257 - RNA, 25 nt, synthetic construct
  misc_feature 1..25: note = synthetic construct
  source 1..25: mol_type = other RNA
tgcctccgtcatcttcagcctctcc

SEQ ID NO: 258 - RNA, 25 nt, synthetic construct
  misc_feature 1..25: note = synthetic construct
  source 1..25: mol_type = other RNA
cctccgtcatcttcagcctctccca

SEQ ID NO: 259 - RNA, 25 nt, synthetic construct
  misc_feature 1..25: note = synthetic construct
  source 1..25: mol_type = other RNA
gggaggagcgtgcaggaagcactga

SEQ ID NO: 260 - RNA, 25 nt, synthetic construct
  misc_feature 1..25: note = synthetic construct
  source 1..25: mol_type = other RNA
gaggagcgtgcaggaagcactgaga

SEQ ID NO: 261 - DNA, 25 bp, synthetic construct
  misc_feature 1..25: note = synthetic construct
  modified_base 8: mod_base = OTHER; note = uracil
  modified_base 20: mod_base = OTHER; note = uracil
  source 1..25: mol_type = other DNA
aggagcgtgcaggaagcactgagat

SEQ ID NO: 262 - DNA, 25 bp, synthetic construct
  misc_feature 1..25: note = synthetic construct
  modified_base 7: mod_base = OTHER; note = uracil
  modified_base 19: mod_base = OTHER; note = uracil
  source 1..25: mol_type = other DNA
ggagcgtgcaggaagcactgagatt

SEQ ID NO: 263 - DNA, 25 bp, synthetic construct
  misc_feature 1..25: note = synthetic construct
  modified_base 6: mod_base = OTHER; note = uracil
  modified_base 18: mod_base = OTHER; note = uracil
  modified_base 23: mod_base = OTHER; note = uracil
  source 1..25: mol_type = other DNA
gagcgtgcaggaagcactgagattc

SEQ ID NO: 264 - RNA, 25 nt, synthetic construct
  misc_feature 1..25: note = synthetic construct
  source 1..25: mol_type = other RNA
agcgtgcaggaagcactgagattcg

SEQ ID NO: 265 - RNA, 25 nt, synthetic construct
  misc_feature 1..25: note = synthetic construct
  source 1..25: mol_type = other RNA
gcgtgcaggaagcactgagattcgg

SEQ ID NO: 266 - RNA, 25 nt, synthetic construct
  misc_feature 1..25: note = synthetic construct
  source 1..25: mol_type = other RNA
cgtgcaggaagcactgagattcggg

SEQ ID NO: 267 - DNA, 25 bp, synthetic construct
  misc_feature 1..25: note = synthetic construct
  modified_base 2: mod_base = OTHER; note = uracil
  modified_base 14: mod_base = OTHER; note = uracil
  modified_base 19..20: mod_base = OTHER; note = uracil
  source 1..25: mol_type = other DNA
gtgcaggaagcactgagattcgggt

SEQ ID NO: 268 - DNA, 25 bp, synthetic construct
  misc_feature 1..25: note = synthetic construct
  modified_base 1: mod_base = OTHER; note = uracil
  modified_base 13: mod_base = OTHER; note = uracil
  modified_base 18..19: mod_base = OTHER; note = uracil
  source 1..25: mol_type = other DNA
tgcaggaagcactgagattcgggtg

SEQ ID NO: 269 - RNA, 25 nt, synthetic construct
  misc_feature 1..25: note = synthetic construct
  source 1..25: mol_type = other RNA
gcaggaagcactgagattcgggtgc

SEQ ID NO: 270 - RNA, 25 nt, synthetic construct
  misc_feature 1..25: note = synthetic construct
  source 1..25: mol_type = other RNA
caggaagcactgagattcgggtgcc

SEQ ID NO: 271 - RNA, 25 nt, synthetic construct
  misc_feature 1..25: note = synthetic construct
  source 1..25: mol_type = other RNA
aggaagcactgagattcgggtgcca

SEQ ID NO: 272 - RNA, 25 nt, synthetic construct
  misc_feature 1..25: note = synthetic construct
  source 1..25: mol_type = other RNA
gcagggctttgatggcatcgtgtga

SEQ ID NO: 273 - RNA, 25 nt, synthetic construct
  misc_feature 1..25: note = synthetic construct
  source 1..25: mol_type = other RNA
agggctttgatggcatcgtgtgaga

SEQ ID NO: 274 - RNA, 25 nt, synthetic construct
  misc_feature 1..25: note = synthetic construct
  source 1..25: mol_type = other RNA
gggctttgatggcatcgtgtgagag

SEQ ID NO: 275 - RNA, 25 nt, synthetic construct
  misc_feature 1..25: note = synthetic construct
  source 1..25: mol_type = other RNA
ggctttgatggcatcgtgtgagagc

SEQ ID NO: 276 - RNA, 25 nt, synthetic construct
  misc_feature 1..25: note = synthetic construct
  source 1..25: mol_type = other RNA
gcctgtgtcctgtgttccccacagg

SEQ ID NO: 277 - RNA, 25 nt, synthetic construct
  misc_feature 1..25: note = synthetic construct
  source 1..25: mol_type = other RNA
ctgtgtcctgtgttccccacaggga

SEQ ID NO: 278 - RNA, 25 nt, synthetic construct
  misc_feature 1..25: note = synthetic construct
  source 1..25: mol_type = other RNA
gtgtcctgtgttccccacagggaga

SEQ ID NO: 279 - RNA, 25 nt, synthetic construct
  misc_feature 1..25: note = synthetic construct
  source 1..25: mol_type = other RNA
cattcctgaggctctgactcttcga

SEQ ID NO: 280 - DNA, 25 bp, synthetic construct
  misc_feature 1..25: note = synthetic construct
  modified_base 2..3: mod_base = OTHER; note = uracil
  modified_base 6: mod_base = OTHER; note = uracil
  modified_base 12: mod_base = OTHER; note = uracil
  modified_base 14: mod_base = OTHER; note = uracil
  modified_base 18: mod_base = OTHER; note = uracil
  modified_base 20..21: mod_base = OTHER; note = uracil
  source 1..25: mol_type = other DNA
attcctgaggctctgactcttcgat

SEQ ID NO: 281 - DNA, 25 bp, synthetic construct
  misc_feature 1..25: note = synthetic construct
  modified_base 1..2: mod_base = OTHER; note = uracil
  modified_base 5: mod_base = OTHER; note = uracil
  modified_base 11: mod_base = OTHER; note = uracil
  modified_base 13: mod_base = OTHER; note = uracil
  modified_base 17: mod_base = OTHER; note = uracil
  modified_base 19..20: mod_base = OTHER; note = uracil
  source 1..25: mol_type = other DNA
ttcctgaggctctgactcttcgatc

SEQ ID NO: 282 - RNA, 25 nt, synthetic construct
  misc_feature 1..25: note = synthetic construct
  source 1..25: mol_type = other RNA
cattccccaaattaacctctccgcc

SEQ ID NO: 283 - RNA, 25 nt, synthetic construct
  misc_feature 1..25: note = synthetic construct
  source 1..25: mol_type = other RNA
attccccaaattaacctctccgccc

SEQ ID NO: 284 - RNA, 25 nt, synthetic construct
  misc_feature 1..25: note = synthetic construct
  source 1..25: mol_type = other RNA
ttccccaaattaacctctccgccca

SEQ ID NO: 285 - DNA, 25 bp, synthetic construct
  misc_feature 1..25: note = synthetic construct
  modified_base 7: mod_base = OTHER; note = uracil
  modified_base 11..12: mod_base = OTHER; note = uracil
  modified_base 14: mod_base = OTHER; note = uracil
  modified_base 21: mod_base = OTHER; note = uracil
  modified_base 23: mod_base = OTHER; note = uracil
  source 1..25: mol_type = other DNA
gggccctgcgttgtgcagactctat

SEQ ID NO: 286 - DNA, 25 bp, synthetic construct
  misc_feature 1..25: note = synthetic construct
  modified_base 6: mod_base = OTHER; note = uracil
  modified_base 10..11: mod_base = OTHER; note = uracil
  modified_base 13: mod_base = OTHER; note = uracil
  modified_base 20: mod_base = OTHER; note = uracil
  modified_base 22: mod_base = OTHER; note = uracil
  source 1..25: mol_type = other DNA
ggccctgcgttgtgcagactctatt

SEQ ID NO: 287 - DNA, 25 bp, synthetic construct
  misc_feature 1..25: note = synthetic construct
  modified_base 5: mod_base = OTHER; note = uracil
  modified_base 9..10: mod_base = OTHER; note = uracil
  modified_base 12: mod_base = OTHER; note = uracil
  modified_base 19: mod_base = OTHER; note = uracil
  modified_base 21: mod_base = OTHER; note = uracil
  modified_base 23: mod_base = OTHER; note = uracil
  source 1..25: mol_type = other DNA
gccctgcgttgtgcagactctattc

SEQ ID NO: 288 - RNA, 25 nt, synthetic construct
  misc_feature 1..25: note = synthetic construct
  source 1..25: mol_type = other RNA
ccctgcgttgtgcagactctattcc

SEQ ID NO: 289 - RNA, 25 nt, synthetic construct
  misc_feature 1..25: note = synthetic construct
  source 1..25: mol_type = other RNA
cctgcgttgtgcagactctattccc

SEQ ID NO: 290 - RNA, 25 nt, synthetic construct
  misc_feature 1..25: note = synthetic construct
  source 1..25: mol_type = other RNA
ctgcgttgtgcagactctattccca

SEQ ID NO: 291 - RNA, 25 nt, synthetic construct
  misc_feature 1..25: note = synthetic construct
  source 1..25: mol_type = other RNA
tgcgttgtgcagactctattcccac

SEQ ID NO: 292 - RNA, 25 nt, synthetic construct
  misc_feature 1..25: note = synthetic construct
  source 1..25: mol_type = other RNA
gcgttgtgcagactctattcccaca

SEQ ID NO: 293 - RNA, 25 nt, synthetic construct
  misc_feature 1..25: note = synthetic construct
  source 1..25: mol_type = other RNA
cgttgtgcagactctattcccacag

SEQ ID NO: 294 - RNA, 25 nt, synthetic construct
  misc_feature 1..25: note = synthetic construct
  source 1..25: mol_type = other RNA
gttgtgcagactctattcccacagc

SEQ ID NO: 295 - DNA, 25 bp, synthetic construct
  misc_feature 1..25: note = synthetic construct
  modified_base 1..2: mod_base = OTHER; note = uracil
  modified_base 4: mod_base = OTHER; note = uracil
  modified_base 11: mod_base = OTHER; note = uracil
  modified_base 13: mod_base = OTHER; note = uracil
  modified_base 15..16: mod_base = OTHER; note = uracil
  source 1..25: mol_type = other DNA
ttgtgcagactctattcccacagct

SEQ ID NO: 296 - DNA, 25 bp, synthetic construct
  misc_feature 1..25: note = synthetic construct
  modified_base 1: mod_base = OTHER; note = uracil
  modified_base 3: mod_base = OTHER; note = uracil
  modified_base 10: mod_base = OTHER; note = uracil
  modified_base 12: mod_base = OTHER; note = uracil
  modified_base 14..15: mod_base = OTHER; note = uracil
  source 1..25: mol_type = other DNA
tgtgcagactctattcccacagctc

SEQ ID NO: 297 - RNA, 25 nt, synthetic construct
  misc_feature 1..25: note = synthetic construct
  source 1..25: mol_type = other RNA
agctcagaagctgggagtccacacc

SEQ ID NO: 298 - RNA, 25 nt, synthetic construct
  misc_feature 1..25: note = synthetic construct
  source 1..25: mol_type = other RNA
agaagctgggagtccacaccgctga

SEQ ID NO: 299 - DNA, 25 bp, synthetic construct
  misc_feature 1..25: note = synthetic construct
  modified_base 2: mod_base = OTHER; note = uracil
  modified_base 7: mod_base = OTHER; note = uracil
  modified_base 19: mod_base = OTHER; note = uracil
  modified_base 21: mod_base = OTHER; note = uracil
  source 1..25: mol_type = other DNA
ctgccctgcccaccagcctgtgatt

SEQ ID NO: 300 - RNA, 25 nt, synthetic construct
  misc_feature 1..25: note = synthetic construct
  source 1..25: mol_type = other RNA
ccctgcccaccagcctgtgatttga

SEQ ID NO: 301 - DNA, 25 bp, synthetic construct
  misc_feature 1..25: note = synthetic construct
  modified_base 3: mod_base = OTHER; note = uracil
  modified_base 15: mod_base = OTHER; note = uracil
  modified_base 17: mod_base = OTHER; note = uracil
  modified_base 20..22: mod_base = OTHER; note = uracil
  source 1..25: mol_type = other DNA
cctgcccaccagcctgtgatttgat

SEQ ID NO: 302 - DNA, 25 bp, synthetic construct
  misc_feature 1..25: note = synthetic construct
  modified_base 2: mod_base = OTHER; note = uracil
  modified_base 14: mod_base = OTHER; note = uracil
  modified_base 16: mod_base = OTHER; note = uracil
  modified_base 19..21: mod_base = OTHER; note = uracil
  source 1..25: mol_type = other DNA
ctgcccaccagcctgtgatttgatg

SEQ ID NO: 303 - RNA, 25 nt, synthetic construct
  misc_feature 1..25: note = synthetic construct
  source 1..25: mol_type = other RNA
gcccaccagcctgtgatttgatggg

SEQ ID NO: 304 - RNA, 25 nt, synthetic construct
  misc_feature 1..25: note = synthetic construct
  source 1..25: mol_type = other RNA
cccaccagcctgtgatttgatgggg

SEQ ID NO: 305 - DNA, 25 bp, synthetic construct
  misc_feature 1..25: note = synthetic construct
  modified_base 3: mod_base = OTHER; note = uracil
  modified_base 7: mod_base = OTHER; note = uracil
  modified_base 19: mod_base = OTHER; note = uracil
  source 1..25: mol_type = other DNA
gctgactgccccagagcctgaaagt

SEQ ID NO: 306 - DNA, 25 bp, synthetic construct
  misc_feature 1..25: note = synthetic construct
  modified_base 4: mod_base = OTHER; note = uracil
  modified_base 16: mod_base = OTHER; note = uracil
  modified_base 22: mod_base = OTHER; note = uracil
  source 1..25: mol_type = other DNA
gactgccccagagcctgaaagtctc

SEQ ID NO: 307 - RNA, 25 nt, synthetic construct
  misc_feature 1..25: note = synthetic construct
  source 1..25: mol_type = other RNA
actgccccagagcctgaaagtctca

SEQ ID NO: 308 - RNA, 25 nt, synthetic construct
  misc_feature 1..25: note = synthetic construct
  source 1..25: mol_type = other RNA
ctgccccagagcctgaaagtctcac

SEQ ID NO: 309 - RNA, 25 nt, synthetic construct
  misc_feature 1..25: note = synthetic construct
  source 1..25: mol_type = other RNA
tgccccagagcctgaaagtctcacc

SEQ ID NO: 310 - RNA, 25 nt, synthetic construct
  misc_feature 1..25: note = synthetic construct
  source 1..25: mol_type = other RNA
gccccagagcctgaaagtctcaccc

SEQ ID NO: 311 - DNA, 25 bp, synthetic construct
  misc_feature 1..25: note = synthetic construct
  modified_base 11: mod_base = OTHER; note = uracil
  modified_base 17: mod_base = OTHER; note = uracil
  modified_base 19: mod_base = OTHER; note = uracil
  source 1..25: mol_type = other DNA
ccccagagcctgaaagtctcaccct

SEQ ID NO: 312 - DNA, 25 bp, synthetic construct
  misc_feature 1..25: note = synthetic construct
  modified_base 10: mod_base = OTHER; note = uracil
  modified_base 16: mod_base = OTHER; note = uracil
  modified_base 18: mod_base = OTHER; note = uracil
  source 1..25: mol_type = other DNA
cccagagcctgaaagtctcaccctt

SEQ ID NO: 313 - DNA, 25 bp, synthetic construct
  misc_feature 1..25: note = synthetic construct
  modified_base 9: mod_base = OTHER; note = uracil
  modified_base 15: mod_base = OTHER; note = uracil
  modified_base 17: mod_base = OTHER; note = uracil
  modified_base 23: mod_base = OTHER; note = uracil
  source 1..25: mol_type = other DNA
ccagagcctgaaagtctcacccttg

SEQ ID NO: 314 - RNA, 25 nt, synthetic construct
  misc_feature 1..25: note = synthetic construct
  source 1..25: mol_type = other RNA
cagagcctgaaagtctcacccttgg

SEQ ID NO: 315 - RNA, 25 nt, synthetic construct
  misc_feature 1..25: note = synthetic construct
  source 1..25: mol_type = other RNA
agagcctgaaagtctcacccttgga

SEQ ID NO: 316 - RNA, 25 nt, synthetic construct
  misc_feature 1..25: note = synthetic construct
  source 1..25: mol_type = other RNA
gagcctgaaagtctcacccttggag

SEQ ID NO: 317 - DNA, 25 bp, synthetic construct
  misc_feature 1..25: note = synthetic construct
  modified_base 10..11: mod_base = OTHER; note = uracil
  modified_base 16..17: mod_base = OTHER; note = uracil
  source 1..25: mol_type = other DNA
gagcccaccttggaattaagggcgt

SEQ ID NO: 318 - RNA, 25 nt, synthetic construct
  misc_feature 1..25: note = synthetic construct
  source 1..25: mol_type = other RNA
gcccaccttggaattaagggcgtgc

SEQ ID NO: 319 - RNA, 25 nt, synthetic construct
  misc_feature 1..25: note = synthetic construct
  source 1..25: mol_type = other RNA
tgcctcagccacaaatgtgacccag

SEQ ID NO: 320 - RNA, 25 nt, synthetic construct
  misc_feature 1..25: note = synthetic construct
  source 1..25: mol_type = other RNA
gcctcagccacaaatgtgacccagg

SEQ ID NO: 321 - RNA, 25 nt, synthetic construct
  misc_feature 1..25: note = synthetic construct
  source 1..25: mol_type = other RNA
cctcagccacaaatgtgacccagga

SEQ ID NO: 322 - DNA, 25 bp, synthetic construct
  misc_feature 1..25: note = synthetic construct
  modified_base 2: mod_base = OTHER; note = uracil
  modified_base 13: mod_base = OTHER; note = uracil
  modified_base 15: mod_base = OTHER; note = uracil
  source 1..25: mol_type = other DNA
ctcagccacaaatgtgacccaggat

SEQ ID NO: 323 - DNA, 25 bp, synthetic construct
  misc_feature 1..25: note = synthetic construct
  modified_base 1: mod_base = OTHER; note = uracil
  modified_base 12: mod_base = OTHER; note = uracil
  modified_base 14: mod_base = OTHER; note = uracil
  source 1..25: mol_type = other DNA
tcagccacaaatgtgacccaggata

SEQ ID NO: 324 - RNA, 25 nt, synthetic construct
  misc_feature 1..25: note = synthetic construct
  source 1..25: mol_type = other RNA
cagccacaaatgtgacccaggatac

SEQ ID NO: 325 - DNA, 25 bp, synthetic construct
  misc_feature 1..25: note = synthetic construct
  modified_base 2: mod_base = OTHER; note = uracil
  modified_base 4: mod_base = OTHER; note = uracil
  modified_base 14: mod_base = OTHER; note = uracil
  modified_base 21: mod_base = OTHER; note = uracil
  modified_base 23: mod_base = OTHER; note = uracil
  source 1..25: mol_type = other DNA
atgtgacccaggatacagagtgttg

SEQ ID NO: 326 - RNA, 25 nt, synthetic construct
  misc_feature 1..25: note = synthetic construct
  source 1..25: mol_type = other RNA
gatctggaacacatattggaattgg

SEQ ID NO: 327 - RNA, 25 nt, synthetic construct
  misc_feature 1..25: note = synthetic construct
  source 1..25: mol_type = other RNA
atctggaacacatattggaattggg

SEQ ID NO: 328 - RNA, 25 nt, synthetic construct
  misc_feature 1..25: note = synthetic construct
  source 1..25: mol_type = other RNA
tctggaacacatattggaattgggg

SEQ ID NO: 329 - RNA, 25 nt, synthetic construct
  misc_feature 1..25: note = synthetic construct
  source 1..25: mol_type = other RNA
ctggaacacatattggaattggggc

SEQ ID NO: 330 - RNA, 25 nt, synthetic construct
  misc_feature 1..25: note = synthetic construct
  source 1..25: mol_type = other RNA
tggaacacatattggaattggggcc

SEQ ID NO: 331 - RNA, 25 nt, synthetic construct
  misc_feature 1..25: note = synthetic construct
  source 1..25: mol_type = other RNA
ggaacacatattggaattggggcca

SEQ ID NO: 332 - RNA, 25 nt, synthetic construct
  misc_feature 1..25: note = synthetic construct
  source 1..25: mol_type = other RNA
gaacacatattggaattggggccaa

SEQ ID NO: 333 - RNA, 25 nt, synthetic construct
  misc_feature 1..25: note = synthetic construct
  source 1..25: mol_type = other RNA
aacacatattggaattggggccaac

SEQ ID NO: 334 - DNA, 25 bp, synthetic construct
  misc_feature 1..25: note = synthetic construct
  modified_base 6: mod_base = OTHER; note = uracil
  modified_base 8..9: mod_base = OTHER; note = uracil
  modified_base 14..15: mod_base = OTHER; note = uracil
  source 1..25: mol_type = other DNA
acacatattggaattggggccaact

SEQ ID NO: 335 - DNA, 25 bp, synthetic construct
  misc_feature 1..25: note = synthetic construct
  modified_base 5: mod_base = OTHER; note = uracil
  modified_base 7..8: mod_base = OTHER; note = uracil
  modified_base 13..14: mod_base = OTHER; note = uracil
  source 1..25: mol_type = other DNA
cacatattggaattggggccaactc

SEQ ID NO: 336 - RNA, 25 nt, synthetic construct
  misc_feature 1..25: note = synthetic construct
  source 1..25: mol_type = other RNA
catattggaattggggccaactcca

SEQ ID NO: 337 - RNA, 25 nt, synthetic construct
  misc_feature 1..25: note = synthetic construct
  source 1..25: mol_type = other RNA
atattggaattggggccaactccaa

SEQ ID NO: 338 - DNA, 25 bp, synthetic construct
  misc_feature 1..25: note = synthetic construct
  modified_base 1: mod_base = OTHER; note = uracil
  modified_base 3..4: mod_base = OTHER; note = uracil
  modified_base 9..10: mod_base = OTHER; note = uracil
  modified_base 20: mod_base = OTHER; note = uracil
  source 1..25: mol_type = other DNA
tattggaattggggccaactccaat

SEQ ID NO: 339 - DNA, 25 bp, synthetic construct
  misc_feature 1..25: note = synthetic construct
  modified_base 2..3: mod_base = OTHER; note = uracil
  modified_base 8..9: mod_base = OTHER; note = uracil
  modified_base 19: mod_base = OTHER; note = uracil
  source 1..25: mol_type = other DNA
attggaattggggccaactccaata

SEQ ID NO: 340 - DNA, 25 bp, synthetic construct
  misc_feature 1..25: note = synthetic construct
  modified_base 1..2: mod_base = OTHER; note = uracil
  modified_base 7..8: mod_base = OTHER; note = uracil
  modified_base 18: mod_base = OTHER; note = uracil
  modified_base 23: mod_base = OTHER; note = uracil
  source 1..25: mol_type = other DNA
ttggaattggggccaactccaatat

SEQ ID NO: 341 - DNA, 25 bp, synthetic construct
  misc_feature 1..25: note = synthetic construct
  modified_base 1: mod_base = OTHER; note = uracil
  modified_base 6..7: mod_base = OTHER; note = uracil
  modified_base 17: mod_base = OTHER; note = uracil
  modified_base 22: mod_base = OTHER; note = uracil
  source 1..25: mol_type = other DNA
tggaattggggccaactccaatata

SEQ ID NO: 342 - RNA, 25 nt, synthetic construct
  misc_feature 1..25: note = synthetic construct
  source 1..25: mol_type = other RNA
ggaattggggccaactccaatatag

SEQ ID NO: 343 - RNA, 25 nt, synthetic construct
  misc_feature 1..25: note = synthetic construct
  source 1..25: mol_type = other RNA
gaattggggccaactccaatatagg

SEQ ID NO: 344 - RNA, 25 nt, synthetic construct
  misc_feature 1..25: note = synthetic construct
  source 1..25: mol_type = other RNA
tggggccaactccaatatagggtgg

SEQ ID NO: 345 - DNA, 25 bp, synthetic construct
  misc_feature 1..25: note = synthetic construct
  modified_base 1: mod_base = OTHER; note = uracil
  modified_base 8..9: mod_base = OTHER; note = uracil
  modified_base 11: mod_base = OTHER; note = uracil
  modified_base 14: mod_base = OTHER; note = uracil
  modified_base 16: mod_base = OTHER; note = uracil
  source 1..25: mol_type = other DNA
taaggccttataatgtaaagagcat

SEQ ID NO: 346 - DNA, 25 bp, synthetic construct
  misc_feature 1..25: note = synthetic construct
  modified_base 7..8: mod_base = OTHER; note = uracil
  modified_base 10: mod_base = OTHER; note = uracil
  modified_base 13: mod_base = OTHER; note = uracil
  modified_base 15: mod_base = OTHER; note = uracil
  source 1..25: mol_type = other DNA
aaggccttataatgtaaagagcata

SEQ ID NO: 347 - DNA, 25 bp, synthetic construct
  misc_feature 1..25: note = synthetic construct
  modified_base 6..7: mod_base = OTHER; note = uracil
  modified_base 9: mod_base = OTHER; note = uracil
  modified_base 12: mod_base = OTHER; note = uracil
  modified_base 14: mod_base = OTHER; note = uracil
  modified_base 23: mod_base = OTHER; note = uracil
  source 1..25: mol_type = other DNA
aggccttataatgtaaagagcatat

SEQ ID NO: 348 - DNA, 25 bp, synthetic construct
  misc_feature 1..25: note = synthetic construct
  modified_base 5..6: mod_base = OTHER; note = uracil
  modified_base 8: mod_base = OTHER; note = uracil
  modified_base 11: mod_base = OTHER; note = uracil
  modified_base 13: mod_base = OTHER; note = uracil
  modified_base 22: mod_base = OTHER; note = uracil
  source 1..25: mol_type = other DNA
ggccttataatgtaaagagcatata

SEQ ID NO: 349 - RNA, 25 nt, synthetic construct
  misc_feature 1..25: note = synthetic construct
  source 1..25: mol_type = other RNA
gccttataatgtaaagagcatataa

SEQ ID NO: 350 - DNA, 25 bp, synthetic construct
  misc_feature 1..25: note = synthetic construct
  modified_base 3..4: mod_base = OTHER; note = uracil
  modified_base 6: mod_base = OTHER; note = uracil
  modified_base 9: mod_base = OTHER; note = uracil
  modified_base 11: mod_base = OTHER; note = uracil
  modified_base 20: mod_base = OTHER; note = uracil
  modified_base 22: mod_base = OTHER; note = uracil
  source 1..25: mol_type = other DNA
ccttataatgtaaagagcatataat

SEQ ID NO: 351 - RNA, 25 nt, synthetic construct
  misc_feature 1..25: note = synthetic construct
  source 1..25: mol_type = other RNA
ataatgtaaagagcatataatgtaa

SEQ ID NO: 352 - RNA, 25 nt, synthetic construct
  misc_feature 1..25: note = synthetic construct
  source 1..25: mol_type = other RNA
agagtgagacagacctggattaaaa

SEQ ID NO: 353 - DNA, 25 bp, synthetic construct
  misc_feature 1..25: note = synthetic construct
  modified_base 4: mod_base = OTHER; note = uracil
  modified_base 6: mod_base = OTHER; note = uracil
  modified_base 11..13: mod_base = OTHER; note = uracil
  modified_base 16..17: mod_base = OTHER; note = uracil
  modified_base 21: mod_base = OTHER; note = uracil
  source 1..25: mol_type = other DNA
aaatctgccatttaattagctgcat

SEQ ID NO: 354 - DNA, 25 bp, synthetic construct
  misc_feature 1..25: note = synthetic construct
  modified_base 3: mod_base = OTHER; note = uracil
  modified_base 5: mod_base = OTHER; note = uracil
  modified_base 10..12: mod_base = OTHER; note = uracil
  modified_base 15..16: mod_base = OTHER; note = uracil
  modified_base 20: mod_base = OTHER; note = uracil
  source 1..25: mol_type = other DNA
aatctgccatttaattagctgcata

SEQ ID NO: 355 - DNA, 25 bp, synthetic construct
  misc_feature 1..25: note = synthetic construct
  modified_base 2: mod_base = OTHER; note = uracil
  modified_base 4: mod_base = OTHER; note = uracil
  modified_base 9..11: mod_base = OTHER; note = uracil
  modified_base 14..15: mod_base = OTHER; note = uracil
  modified_base 19: mod_base = OTHER; note = uracil
  modified_base 23: mod_base = OTHER; note = uracil
  source 1..25: mol_type = other DNA
atctgccatttaattagctgcatat

SEQ ID NO: 356 - DNA, 25 bp, synthetic construct
  misc_feature 1..25: note = synthetic construct
  modified_base 1: mod_base = OTHER; note = uracil
  modified_base 3: mod_base = OTHER; note = uracil
  modified_base 8..10: mod_base = OTHER; note = uracil
  modified_base 13..14: mod_base = OTHER; note = uracil
  modified_base 18: mod_base = OTHER; note = uracil
  modified_base 22: mod_base = OTHER; note = uracil
  source 1..25: mol_type = other DNA
tctgccatttaattagctgcatatc

SEQ ID NO: 357 - RNA, 25 nt, synthetic construct
  misc_feature 1..25: note = synthetic construct
  source 1..25: mol_type = other RNA
ctgccatttaattagctgcatatca

SEQ ID NO: 358 - RNA, 25 nt, synthetic construct
  misc_feature 1..25: note = synthetic construct
  source 1..25: mol_type = other RNA
tgccatttaattagctgcatatcac

SEQ ID NO: 359 - RNA, 25 nt, synthetic construct
  misc_feature 1..25: note = synthetic construct
  source 1..25: mol_type = other RNA
gccatttaattagctgcatatcacc

SEQ ID NO: 360 - RNA, 25 nt, synthetic construct
  misc_feature 1..25: note = synthetic construct
  source 1..25: mol_type = other RNA
cagcacttaacgcaatctgcctcaa

SEQ ID NO: 361 - DNA, 25 bp, synthetic construct
  misc_feature 1..25: note = synthetic construct
  modified_base 4: mod_base = OTHER; note = uracil
  modified_base 8..10: mod_base = OTHER; note = uracil
  modified_base 12..13: mod_base = OTHER; note = uracil
  modified_base 16: mod_base = OTHER; note = uracil
  modified_base 18: mod_base = OTHER; note = uracil
  modified_base 20: mod_base = OTHER; note = uracil
  source 1..25: mol_type = other DNA
gcctcaatttcttcatctgtcaaat

SEQ ID NO: 362 - DNA, 25 bp, synthetic construct
  misc_feature 1..25: note = synthetic construct
  modified_base 3: mod_base = OTHER; note = uracil
  modified_base 7..9: mod_base = OTHER; note = uracil
  modified_base 11..12: mod_base = OTHER; note = uracil
  modified_base 15: mod_base = OTHER; note = uracil
  modified_base 17: mod_base = OTHER; note = uracil
  modified_base 19: mod_base = OTHER; note = uracil
  source 1..25: mol_type = other DNA
cctcaatttcttcatctgtcaaatg

SEQ ID NO: 363 - RNA, 25 nt, synthetic construct
  misc_feature 1..25: note = synthetic construct
  source 1..25: mol_type = other RNA
ctcaatttcttcatctgtcaaatgg

SEQ ID NO: 364 - RNA, 25 nt, synthetic construct
  misc_feature 1..25: note = synthetic construct
  source 1..25: mol_type = other RNA
tcaatttcttcatctgtcaaatgga

SEQ ID NO: 365 - RNA, 25 nt, synthetic construct
  misc_feature 1..25: note = synthetic construct
  source 1..25: mol_type = other RNA
caatttcttcatctgtcaaatggaa

SEQ ID NO: 366 - RNA, 25 nt, synthetic construct
  misc_feature 1..25: note = synthetic construct
  source 1..25: mol_type = other RNA
aatttcttcatctgtcaaatggaac

SEQ ID NO: 367 - RNA, 25 nt, synthetic construct
  misc_feature 1..25: note = synthetic construct
  source 1..25: mol_type = other RNA
atttcttcatctgtcaaatggaacc

SEQ ID NO: 368 - RNA, 25 nt, synthetic construct
  misc_feature 1..25: note = synthetic construct
  source 1..25: mol_type = other RNA
tttcttcatctgtcaaatggaacca

SEQ ID NO: 369 - RNA, 25 nt, synthetic construct
  misc_feature 1..25: note = synthetic construct
  source 1..25: mol_type = other RNA
ttcttcatctgtcaaatggaaccaa

SEQ ID NO: 370 - DNA, 25 bp, synthetic construct
  misc_feature 1..25: note = synthetic construct
  modified_base 1: mod_base = OTHER; note = uracil
  modified_base 3..4: mod_base = OTHER; note = uracil
  modified_base 7: mod_base = OTHER; note = uracil
  modified_base 9: mod_base = OTHER; note = uracil
  modified_base 11: mod_base = OTHER; note = uracil
  modified_base 16: mod_base = OTHER; note = uracil
  source 1..25: mol_type = other DNA
tcttcatctgtcaaatggaaccaat

SEQ ID NO: 371 - DNA, 25 bp, synthetic construct
  misc_feature 1..25: note = synthetic construct
  modified_base 1: mod_base = OTHER; note = uracil
  modified_base 3: mod_base = OTHER; note = uracil
  modified_base 5: mod_base = OTHER; note = uracil
  modified_base 10: mod_base = OTHER; note = uracil
  modified_base 19..20: mod_base = OTHER; note = uracil
  modified_base 22: mod_base = OTHER; note = uracil
  source 1..25: mol_type = other DNA
tctgtcaaatggaaccaattctgct

SEQ ID NO: 372 - DNA, 25 bp, synthetic construct
  misc_feature 1..25: note = synthetic construct
  modified_base 2: mod_base = OTHER; note = uracil
  modified_base 4: mod_base = OTHER; note = uracil
  modified_base 9: mod_base = OTHER; note = uracil
  modified_base 18..19: mod_base = OTHER; note = uracil
  modified_base 21: mod_base = OTHER; note = uracil
  source 1..25: mol_type = other DNA
ctgtcaaatggaaccaattctgctt

SEQ ID NO: 373 - RNA, 25 nt, synthetic construct
  misc_feature 1..25: note = synthetic construct
  source 1..25: mol_type = other RNA
gtcaaatggaaccaattctgcttgg

SEQ ID NO: 374 - RNA, 25 nt, synthetic construct
  misc_feature 1..25: note = synthetic construct
  source 1..25: mol_type = other RNA
atggaaccaattctgcttggctaca

SEQ ID NO: 375 - RNA, 25 nt, synthetic construct
  misc_feature 1..25: note = synthetic construct
  source 1..25: mol_type = other RNA
tggaaccaattctgcttggctacag

SEQ ID NO: 376 - DNA, 25 bp, synthetic construct
  misc_feature 1..25: note = synthetic construct
  modified_base 5..6: mod_base = OTHER; note = uracil
  modified_base 8: mod_base = OTHER; note = uracil
  modified_base 11..12: mod_base = OTHER; note = uracil
  modified_base 16: mod_base = OTHER; note = uracil
  modified_base 23: mod_base = OTHER; note = uracil
  source 1..25: mol_type = other DNA
ccaattctgcttggctacagaatta

SEQ ID NO: 377 - RNA, 25 nt, synthetic construct
  misc_feature 1..25: note = synthetic construct
  source 1..25: mol_type = other RNA
ctgcttggctacagaattattgtga

SEQ ID NO: 378 - RNA, 25 nt, synthetic construct
  misc_feature 1..25: note = synthetic construct
  source 1..25: mol_type = other RNA
ggctacagaattattgtgaggataa

SEQ ID NO: 379 - RNA, 25 nt, synthetic construct
  misc_feature 1..25: note = synthetic construct
  source 1..25: mol_type = other RNA
gctacagaattattgtgaggataaa

SEQ ID NO: 380 - RNA, 25 nt, synthetic construct
  misc_feature 1..25: note = synthetic construct
  source 1..25: mol_type = other RNA
ctacagaattattgtgaggataaaa

SEQ ID NO: 381 - DNA, 25 bp, synthetic construct
  misc_feature 1..25: note = synthetic construct
  modified_base 1: mod_base = OTHER; note = uracil
  modified_base 8..9: mod_base = OTHER; note = uracil
  modified_base 11..12: mod_base = OTHER; note = uracil
  modified_base 14: mod_base = OTHER; note = uracil
  modified_base 20: mod_base = OTHER; note = uracil
  source 1..25: mol_type = other DNA
tacagaattattgtgaggataaaat

SEQ ID NO: 382 - DNA, 25 bp, synthetic construct
  misc_feature 1..25: note = synthetic construct
  modified_base 7..8: mod_base = OTHER; note = uracil
  modified_base 10..11: mod_base = OTHER; note = uracil
  modified_base 13: mod_base = OTHER; note = uracil
  modified_base 19: mod_base = OTHER; note = uracil
  source 1..25: mol_type = other DNA
acagaattattgtgaggataaaatc

SEQ ID NO: 383 - RNA, 25 nt, synthetic construct
  misc_feature 1..25: note = synthetic construct
  source 1..25: mol_type = other RNA
cagaattattgtgaggataaaatca

SEQ ID NO: 384 - DNA, 25 bp, synthetic construct
  misc_feature 1..25: note = synthetic construct
  modified_base 5..6: mod_base = OTHER; note = uracil
  modified_base 8..9: mod_base = OTHER; note = uracil
  modified_base 11: mod_base = OTHER; note = uracil
  modified_base 17: mod_base = OTHER; note = uracil
  modified_base 22: mod_base = OTHER; note = uracil
  source 1..25: mol_type = other DNA
agaattattgtgaggataaaatcat

SEQ ID NO: 385 - DNA, 25 bp, synthetic construct
  misc_feature 1..25: note = synthetic construct
  modified_base 4..5: mod_base = OTHER; note = uracil
  modified_base 7..8: mod_base = OTHER; note = uracil
  modified_base 10: mod_base = OTHER; note = uracil
  modified_base 16: mod_base = OTHER; note = uracil
  modified_base 21: mod_base = OTHER; note = uracil
  source 1..25: mol_type = other DNA
gaattattgtgaggataaaatcata

SEQ ID NO: 386 - DNA, 25 bp, synthetic construct
  misc_feature 1..25: note = synthetic construct
  modified_base 3..4: mod_base = OTHER; note = uracil
  modified_base 6..7: mod_base = OTHER; note = uracil
  modified_base 9: mod_base = OTHER; note = uracil
  modified_base 15: mod_base = OTHER; note = uracil
  modified_base 20: mod_base = OTHER; note = uracil
  modified_base 23: mod_base = OTHER; note = uracil
  source 1..25: mol_type = other DNA
aattattgtgaggataaaatcatat

SEQ ID NO: 387 - DNA, 25 bp, synthetic construct
  misc_feature 1..25: note = synthetic construct
  modified_base 2..3: mod_base = OTHER; note = uracil
  modified_base 5..6: mod_base = OTHER; note = uracil
  modified_base 8: mod_base = OTHER; note = uracil
  modified_base 14: mod_base = OTHER; note = uracil
  modified_base 19: mod_base = OTHER; note = uracil
  modified_base 22: mod_base = OTHER; note = uracil
  source 1..25: mol_type = other DNA
attattgtgaggataaaatcatata

SEQ ID NO: 388 - RNA, 27 nt, synthetic construct
  misc_feature 1..27: note = synthetic construct
  source 1..27: mol_type = other RNA
cgagaatgcaaagagaaaatgcgctac

SEQ ID NO: 389 - RNA, 27 nt, synthetic construct
  misc_feature 1..27: note = synthetic construct
  source 1..27: mol_type = other RNA
tcgagaatgcaaagagaaaatgcgcta

SEQ ID NO: 390 - RNA, 27 nt, synthetic construct
  misc_feature 1..27: note = synthetic construct
  source 1..27: mol_type = other RNA
ctcgagaatgcaaagagaaaatgcgct

SEQ ID NO: 391 - RNA, 27 nt, synthetic construct
  misc_feature 1..27: note = synthetic construct
  source 1..27: mol_type = other RNA
tctcgagaatgcaaagagaaaatgcgc

SEQ ID NO: 392 - RNA, 27 nt, synthetic construct
  misc_feature 1..27: note = synthetic construct
  source 1..27: mol_type = other RNA
atctcgagaatgcaaagagaaaatgcg

SEQ ID NO: 393 - RNA, 27 nt, synthetic construct
  misc_feature 1..27: note = synthetic construct
  source 1..27: mol_type = other RNA
gatctcgagaatgcaaagagaaaatgc

SEQ ID NO: 394 - RNA, 27 nt, synthetic construct
  misc_feature 1..27: note = synthetic construct
  source 1..27: mol_type = other RNA
cgatctcgagaatgcaaagagaaaatg

SEQ ID NO: 395 - RNA, 27 nt, synthetic construct
  misc_feature 1..27: note = synthetic construct
  source 1..27: mol_type = other RNA
gcgatctcgagaatgcaaagagaaaat

SEQ ID NO: 396 - RNA, 27 nt, synthetic construct
  misc_feature 1..27: note = synthetic construct
  source 1..27: mol_type = other RNA
agcgatctcgagaatgcaaagagaaaa

SEQ ID NO: 397 - RNA, 27 nt, synthetic construct
  misc_feature 1..27: note = synthetic construct
  source 1..27: mol_type = other RNA
aagcgatctcgagaatgcaaagagaaa

SEQ ID NO: 398 - RNA, 27 nt, synthetic construct
  misc_feature 1..27: note = synthetic construct
  source 1..27: mol_type = other RNA
taagcgatctcgagaatgcaaagagaa

SEQ ID NO: 399 - RNA, 27 nt, synthetic construct
  misc_feature 1..27: note = synthetic construct
  source 1..27: mol_type = other RNA
ctaagcgatctcgagaatgcaaagaga

SEQ ID NO: 400 - RNA, 27 nt, synthetic construct
  misc_feature 1..27: note = synthetic construct
  source 1..27: mol_type = other RNA
gctaagcgatctcgagaatgcaaagag

SEQ ID NO: 401 - RNA, 27 nt, synthetic construct
  misc_feature 1..27: note = synthetic construct
  source 1..27: mol_type = other RNA
ggctaagcgatctcgagaatgcaaaga

SEQ ID NO: 402 - RNA, 27 nt, synthetic construct
  misc_feature 1..27: note = synthetic construct
  source 1..27: mol_type = other RNA
ttcctcgcttgtcagatggactcacag

SEQ ID NO: 403 - RNA, 27 nt, synthetic construct
  misc_feature 1..27: note = synthetic construct
  source 1..27: mol_type = other RNA
gtttcctcgcttgtcagatggactcac

SEQ ID NO: 404 - RNA, 27 nt, synthetic construct
  misc_feature 1..27: note = synthetic construct
  source 1..27: mol_type = other RNA
agtttcctcgcttgtcagatggactca

SEQ ID NO: 405 - RNA, 27 nt, synthetic construct
  misc_feature 1..27: note = synthetic construct
  source 1..27: mol_type = other RNA
tagtttcctcgcttgtcagatggactc

SEQ ID NO: 406 - RNA, 27 nt, synthetic construct
  misc_feature 1..27: note = synthetic construct
  source 1..27: mol_type = other RNA
ttagtttcctcgcttgtcagatggact

SEQ ID NO: 407 - RNA, 27 nt, synthetic construct
  misc_feature 1..27: note = synthetic construct
  source 1..27: mol_type = other RNA
cttagtttcctcgcttgtcagatggac

SEQ ID NO: 408 - RNA, 27 nt, synthetic construct
  misc_feature 1..27: note = synthetic construct
  source 1..27: mol_type = other RNA
ccttagtttcctcgcttgtcagatgga

SEQ ID NO: 409 - RNA, 27 nt, synthetic construct
  misc_feature 1..27: note = synthetic construct
  source 1..27: mol_type = other RNA
gccttagtttcctcgcttgtcagatgg

SEQ ID NO: 410 - RNA, 27 nt, synthetic construct
  misc_feature 1..27: note = synthetic construct
  source 1..27: mol_type = other RNA
agccttagtttcctcgcttgtcagatg

SEQ ID NO: 411 - RNA, 27 nt, synthetic construct
  misc_feature 1..27: note = synthetic construct
  source 1..27: mol_type = other RNA
cctcttatccaggaggatggtgtcccc

SEQ ID NO: 412 - RNA, 27 nt, synthetic construct
  misc_feature 1..27: note = synthetic construct
  source 1..27: mol_type = other RNA
gcctcttatccaggaggatggtgtccc

SEQ ID NO: 413 - RNA, 27 nt, synthetic construct
  misc_feature 1..27: note = synthetic construct
  source 1..27: mol_type = other RNA
tgcctcttatccaggaggatggtgtcc

SEQ ID NO: 414 - RNA, 27 nt, synthetic construct
  misc_feature 1..27: note = synthetic construct
  source 1..27: mol_type = other RNA
ggatctgcttctcttccatgaggctac

SEQ ID NO: 415 - RNA, 27 nt, synthetic construct
  misc_feature 1..27: note = synthetic construct
  source 1..27: mol_type = other RNA
aggatctgcttctcttccatgaggcta

SEQ ID NO: 416 - RNA, 27 nt, synthetic construct
  misc_feature 1..27: note = synthetic construct
  source 1..27: mol_type = other RNA
caggatctgcttctcttccatgaggct

SEQ ID NO: 417 - RNA, 27 nt, synthetic construct
  misc_feature 1..27: note = synthetic construct
  source 1..27: mol_type = other RNA
acaggatctgcttctcttccatgaggc

SEQ ID NO: 418 - RNA, 27 nt, synthetic construct
  misc_feature 1..27: note = synthetic construct
  source 1..27: mol_type = other RNA
cacaggatctgcttctcttccatgagg

SEQ ID NO: 419 - RNA, 27 nt, synthetic construct
  misc_feature 1..27: note = synthetic construct
  source 1..27: mol_type = other RNA
gcacaggatctgcttctcttccatgag

SEQ ID NO: 420 - RNA, 27 nt, synthetic construct
  misc_feature 1..27: note = synthetic construct
  source 1..27: mol_type = other RNA
cgcacaggatctgcttctcttccatga

SEQ ID NO: 421 - RNA, 27 nt, synthetic construct
  misc_feature 1..27: note = synthetic construct
  source 1..27: mol_type = other RNA
acgcacaggatctgcttctcttccatg

SEQ ID NO: 422 - RNA, 27 nt, synthetic construct
  misc_feature 1..27: note = synthetic construct
  source 1..27: mol_type = other RNA
cacgcacaggatctgcttctcttccat

SEQ ID NO: 423 - RNA, 27 nt, synthetic construct
  misc_feature 1..27: note = synthetic construct
  source 1..27: mol_type = other RNA
ccacgcacaggatctgcttctcttcca

SEQ ID NO: 424 - RNA, 27 nt, synthetic construct
  misc_feature 1..27: note = synthetic construct
  source 1..27: mol_type = other RNA
cccacgcacaggatctgcttctcttcc

SEQ ID NO: 425 - RNA, 27 nt, synthetic construct
  misc_feature 1..27: note = synthetic construct
  source 1..27: mol_type = other RNA
ccccacgcacaggatctgcttctcttc

SEQ ID NO: 426 - RNA, 27 nt, synthetic construct
  misc_feature 1..27: note = synthetic construct
  source 1..27: mol_type = other RNA
agccccacgcacaggatctgcttctct

SEQ ID NO: 427 - RNA, 27 nt, synthetic construct
  misc_feature 1..27: note = synthetic construct
  source 1..27: mol_type = other RNA
tagccccacgcacaggatctgcttctc

SEQ ID NO: 428 - RNA, 27 nt, synthetic construct
  misc_feature 1..27: note = synthetic construct
  source 1..27: mol_type = other RNA
ctagccccacgcacaggatctgcttct

SEQ ID NO: 429 - RNA, 27 nt, synthetic construct
  misc_feature 1..27: note = synthetic construct
  source 1..27: mol_type = other RNA
ctgatgacgtccagcaccactagcccc

SEQ ID NO: 430 - RNA, 27 nt, synthetic construct
  misc_feature 1..27: note = synthetic construct
  source 1..27: mol_type = other RNA
aggctgatgacgtccagcaccactagc

SEQ ID NO: 431 - RNA, 27 nt, synthetic construct
  misc_feature 1..27: note = synthetic construct
  source 1..27: mol_type = other RNA
ccaggctgatgacgtccagcaccacta

SEQ ID NO: 432 - RNA, 27 nt, synthetic construct
  misc_feature 1..27: note = synthetic construct
  source 1..27: mol_type = other RNA
accaggctgatgacgtccagcaccact

SEQ ID NO: 433 - RNA, 27 nt, synthetic construct
  misc_feature 1..27: note = synthetic construct
  source 1..27: mol_type = other RNA
caccaggctgatgacgtccagcaccac

SEQ ID NO: 434 - RNA, 27 nt, synthetic construct
  misc_feature 1..27: note = synthetic construct
  source 1..27: mol_type = other RNA
ccaccaggctgatgacgtccagcacca

SEQ ID NO: 435 - RNA, 27 nt, synthetic construct
  misc_feature 1..27: note = synthetic construct
  source 1..27: mol_type = other RNA
tccaccaggctgatgacgtccagcacc

SEQ ID NO: 436 - RNA, 27 nt, synthetic construct
  misc_feature 1..27: note = synthetic construct
  source 1..27: mol_type = other RNA
gtccaccaggctgatgacgtccagcac

SEQ ID NO: 437 - RNA, 27 nt, synthetic construct
  misc_feature 1..27: note = synthetic construct
  source 1..27: mol_type = other RNA
tgtccaccaggctgatgacgtccagca

SEQ ID NO: 438 - RNA, 27 nt, synthetic construct
  misc_feature 1..27: note = synthetic construct
  source 1..27: mol_type = other RNA
ttgtccaccaggctgatgacgtccagc

SEQ ID NO: 439 - RNA, 27 nt, synthetic construct
  misc_feature 1..27: note = synthetic construct
  source 1..27: mol_type = other RNA
cttgtccaccaggctgatgacgtccag

SEQ ID NO: 440 - RNA, 27 nt, synthetic construct
  misc_feature 1..27: note = synthetic construct
  source 1..27: mol_type = other RNA
acttgtccaccaggctgatgacgtcca

SEQ ID NO: 441 - RNA, 27 nt, synthetic construct
  misc_feature 1..27: note = synthetic construct
  source 1..27: mol_type = other RNA
tacttgtccaccaggctgatgacgtcc

SEQ ID NO: 442 - RNA, 27 nt, synthetic construct
  misc_feature 1..27: note = synthetic construct
  source 1..27: mol_type = other RNA
gtacttgtccaccaggctgatgacgtc

SEQ ID NO: 443 - RNA, 27 nt, synthetic construct
  misc_feature 1..27: note = synthetic construct
  source 1..27: mol_type = other RNA
ggtacttgtccaccaggctgatgacgt

SEQ ID NO: 444 - RNA, 27 nt, synthetic construct
  misc_feature 1..27: note = synthetic construct
  source 1..27: mol_type = other RNA
gggtacttgtccaccaggctgatgacg

SEQ ID NO: 445 - RNA, 27 nt, synthetic construct
  misc_feature 1..27: note = synthetic construct
  source 1..27: mol_type = other RNA
agggtacttgtccaccaggctgatgac

SEQ ID NO: 446 - RNA, 27 nt, synthetic construct
  misc_feature 1..27: note = synthetic construct
  source 1..27: mol_type = other RNA
tagggtacttgtccaccaggctgatga

SEQ ID NO: 447 - RNA, 27 nt, synthetic construct
  misc_feature 1..27: note = synthetic construct
  source 1..27: mol_type = other RNA
ttagggtacttgtccaccaggctgatg

SEQ ID NO: 448 - RNA, 27 nt, synthetic construct
  misc_feature 1..27: note = synthetic construct
  source 1..27: mol_type = other RNA
cttagggtacttgtccaccaggctgat

SEQ ID NO: 449 - RNA, 27 nt, synthetic construct
  misc_feature 1..27: note = synthetic construct
  source 1..27: mol_type = other RNA
ccttagggtacttgtccaccaggctga

SEQ ID NO: 450 - RNA, 27 nt, synthetic construct
  misc_feature 1..27: note = synthetic construct
  source 1..27: mol_type = other RNA
tccttagggtacttgtccaccaggctg

SEQ ID NO: 451 - RNA, 27 nt, synthetic construct
  misc_feature 1..27: note = synthetic construct
  source 1..27: mol_type = other RNA
ctccttagggtacttgtccaccaggct

SEQ ID NO: 452 - RNA, 27 nt, synthetic construct
  misc_feature 1..27: note = synthetic construct
  source 1..27: mol_type = other RNA
cctccttagggtacttgtccaccaggc

SEQ ID NO: 453 - RNA, 27 nt, synthetic construct
  misc_feature 1..27: note = synthetic construct
  source 1..27: mol_type = other RNA
tcctccttagggtacttgtccaccagg

SEQ ID NO: 454 - RNA, 27 nt, synthetic construct
  misc_feature 1..27: note = synthetic construct
  source 1..27: mol_type = other RNA
gtcctccttagggtacttgtccaccag

SEQ ID NO: 455 - RNA, 27 nt, synthetic construct
  misc_feature 1..27: note = synthetic construct
  source 1..27: mol_type = other RNA
agtcctccttagggtacttgtccacca

SEQ ID NO: 456 - RNA, 27 nt, synthetic construct
  misc_feature 1..27: note = synthetic construct
  source 1..27: mol_type = other RNA
gagtcctccttagggtacttgtccacc

SEQ ID NO: 457 - RNA, 27 nt, synthetic construct
  misc_feature 1..27: note = synthetic construct
  source 1..27: mol_type = other RNA
cgagtcctccttagggtacttgtccac

SEQ ID NO: 458 - RNA, 27 nt, synthetic construct
  misc_feature 1..27: note = synthetic construct
  source 1..27: mol_type = other RNA
ccgagtcctccttagggtacttgtcca

SEQ ID NO: 459 - RNA, 27 nt, synthetic construct
  misc_feature 1..27: note = synthetic construct
  source 1..27: mol_type = other RNA
tccgagtcctccttagggtacttgtcc

SEQ ID NO: 460 - RNA, 27 nt, synthetic construct
  misc_feature 1..27: note = synthetic construct
  source 1..27: mol_type = other RNA
ctccgagtcctccttagggtacttgtc

SEQ ID NO: 461 - RNA, 27 nt, synthetic construct
  misc_feature 1..27: note = synthetic construct
  source 1..27: mol_type = other RNA
tctccgagtcctccttagggtacttgt

SEQ ID NO: 462 - RNA, 27 nt, synthetic construct
  misc_feature 1..27: note = synthetic construct
  source 1..27: mol_type = other RNA
atctccgagtcctccttagggtacttg

SEQ ID NO: 463 - RNA, 27 nt, synthetic construct
  misc_feature 1..27: note = synthetic construct
  source 1..27: mol_type = other RNA
gagaacggtgcaggagttggacgcgtt

SEQ ID NO: 464 - RNA, 27 nt, synthetic construct
  misc_feature 1..27: note = synthetic construct
  source 1..27: mol_type = other RNA
ggagagaacggtgcaggagttggacgc

SEQ ID NO: 465 - RNA, 27 nt, synthetic construct
  misc_feature 1..27: note = synthetic construct
  source 1..27: mol_type = other RNA
gggagagaacggtgcaggagttggacg

SEQ ID NO: 466 - RNA, 27 nt, synthetic construct
  misc_feature 1..27: note = synthetic construct
  source 1..27: mol_type = other RNA
agggagagaacggtgcaggagttggac

SEQ ID NO: 467 - RNA, 27 nt, synthetic construct
  misc_feature 1..27: note = synthetic construct
  source 1..27: mol_type = other RNA
cagggagagaacggtgcaggagttgga

SEQ ID NO: 468 - RNA, 27 nt, synthetic construct
  misc_feature 1..27: note = synthetic construct
  source 1..27: mol_type = other RNA
gcagggagagaacggtgcaggagttgg

SEQ ID NO: 469 - RNA, 27 nt, synthetic construct
  misc_feature 1..27: note = synthetic construct
  source 1..27: mol_type = other RNA
agcagggagagaacggtgcaggagttg

SEQ ID NO: 470 - RNA, 27 nt, synthetic construct
  misc_feature 1..27: note = synthetic construct
  source 1..27: mol_type = other RNA
gagcagggagagaacggtgcaggagtt

SEQ ID NO: 471 - RNA, 27 nt, synthetic construct
  misc_feature 1..27: note = synthetic construct
  source 1..27: mol_type = other RNA
tccgagcagggagagaacggtgcagga

SEQ ID NO: 472 - RNA, 27 nt, synthetic construct
  misc_feature 1..27: note = synthetic construct
  source 1..27: mol_type = other RNA
attgagcccatgaaggcacagggggct

SEQ ID NO: 473 - RNA, 27 nt, synthetic construct
  misc_feature 1..27: note = synthetic construct
  source 1..27: mol_type = other RNA
gtcggccaccaggaagtcagcaacatg

SEQ ID NO: 474 - RNA, 27 nt, synthetic construct
  misc_feature 1..27: note = synthetic construct
  source 1..27: mol_type = other RNA
tggagcacaatggtacggttgccattg

SEQ ID NO: 475 - RNA, 27 nt, synthetic construct
  misc_feature 1..27: note = synthetic construct
  source 1..27: mol_type = other RNA
atggagcacaatggtacggttgccatt

SEQ ID NO: 476 - RNA, 27 nt, synthetic construct
  misc_feature 1..27: note = synthetic construct
  source 1..27: mol_type = other RNA
tcatggagcacaatggtacggttgcca

SEQ ID NO: 477 - RNA, 27 nt, synthetic construct
  misc_feature 1..27: note = synthetic construct
  source 1..27: mol_type = other RNA
gtcatggagcacaatggtacggttgcc

SEQ ID NO: 478 - RNA, 27 nt, synthetic construct
  misc_feature 1..27: note = synthetic construct
  source 1..27: mol_type = other RNA
tgtcatggagcacaatggtacggttgc

SEQ ID NO: 479 - RNA, 27 nt, synthetic construct
  misc_feature 1..27: note = synthetic construct
  source 1..27: mol_type = other RNA
gtgtcatggagcacaatggtacggttg

SEQ ID NO: 480 - RNA, 27 nt, synthetic construct
  misc_feature 1..27: note = synthetic construct
  source 1..27: mol_type = other RNA
tgtagcagacacatctggcaggctcgt

SEQ ID NO: 481 - RNA, 27 nt, synthetic construct
  misc_feature 1..27: note = synthetic construct
  source 1..27: mol_type = other RNA
ctgtagcagacacatctggcaggctcg

SEQ ID NO: 482 - RNA, 27 nt, synthetic construct
  misc_feature 1..27: note = synthetic construct
  source 1..27: mol_type = other RNA
tctgtagcagacacatctggcaggctc

SEQ ID NO: 483 - RNA, 27 nt, synthetic construct
  misc_feature 1..27: note = synthetic construct
  source 1..27: mol_type = other RNA
gtctgtagcagacacatctggcaggct

SEQ ID NO: 484 - RNA, 27 nt, synthetic construct
  misc_feature 1..27: note = synthetic construct
  source 1..27: mol_type = other RNA
agtctgtagcagacacatctggcaggc

SEQ ID NO: 485 - RNA, 27 nt, synthetic construct
  misc_feature 1..27: note = synthetic construct
  source 1..27: mol_type = other RNA
aagtctgtagcagacacatctggcagg

SEQ ID NO: 486 - RNA, 27 nt, synthetic construct
  misc_feature 1..27: note = synthetic construct
  source 1..27: mol_type = other RNA
tcaaagtctgtagcagacacatctggc

SEQ ID NO: 487 - RNA, 27 nt, synthetic construct
  misc_feature 1..27: note = synthetic construct
  source 1..27: mol_type = other RNA
gtcagatcaaccttctcaaagtctgta

SEQ ID NO: 488 - RNA, 27 nt, synthetic construct
  misc_feature 1..27: note = synthetic construct
  source 1..27: mol_type = other RNA
gggtcagatcaaccttctcaaagtctg

SEQ ID NO: 489 - RNA, 27 nt, synthetic construct
  misc_feature 1..27: note = synthetic construct
  source 1..27: mol_type = other RNA
tgggtcagatcaaccttctcaaagtct

SEQ ID NO: 490 - RNA, 27 nt, synthetic construct
  misc_feature 1..27: note = synthetic construct
  source 1..27: mol_type = other RNA
ctgggtcagatcaaccttctcaaagtc

SEQ ID NO: 491 - RNA, 27 nt, synthetic construct
  misc_feature 1..27: note = synthetic construct
  source 1..27: mol_type = other RNA
actgggtcagatcaaccttctcaaagt

SEQ ID NO: 492 - RNA, 27 nt, synthetic construct
  misc_feature 1..27: note = synthetic construct
  source 1..27: mol_type = other RNA
aactgggtcagatcaaccttctcaaag

SEQ ID NO: 493 - RNA, 27 nt, synthetic construct
  misc_feature 1..27: note = synthetic construct
  source 1..27: mol_type = other RNA
gaactgggtcagatcaaccttctcaaa

SEQ ID NO: 494 - RNA, 27 nt, synthetic construct
  misc_feature 1..27: note = synthetic construct
  source 1..27: mol_type = other RNA
tgaactgggtcagatcaaccttctcaa

SEQ ID NO: 495 - RNA, 27 nt, synthetic construct
  misc_feature 1..27: note = synthetic construct
  source 1..27: mol_type = other RNA
ttgaactgggtcagatcaaccttctca

SEQ ID NO: 496 - RNA, 27 nt, synthetic construct
  misc_feature 1..27: note = synthetic construct
  source 1..27: mol_type = other RNA
cttgaactgggtcagatcaaccttctc

SEQ ID NO: 497 - RNA, 27 nt, synthetic construct
  misc_feature 1..27: note = synthetic construct
  source 1..27: mol_type = other RNA
acttgaactgggtcagatcaaccttct

SEQ ID NO: 498 - RNA, 27 nt, synthetic construct
  misc_feature 1..27: note = synthetic construct
  source 1..27: mol_type = other RNA
cacttgaactgggtcagatcaaccttc

SEQ ID NO: 499 - RNA, 27 nt, synthetic construct
  misc_feature 1..27: note = synthetic construct
  source 1..27: mol_type = other RNA
ccacttgaactgggtcagatcaacctt

SEQ ID NO: 500 - RNA, 27 nt, synthetic construct
  misc_feature 1..27: note = synthetic construct
  source 1..27: mol_type = other RNA
tccacttgaactgggtcagatcaacct

SEQ ID NO: 501 - RNA, 27 nt, synthetic construct
  misc_feature 1..27: note = synthetic construct
  source 1..27: mol_type = other RNA
atccacttgaactgggtcagatcaacc

SEQ ID NO: 502 - RNA, 27 nt, synthetic construct
  misc_feature 1..27: note = synthetic construct
  source 1..27: mol_type = other RNA
gatccacttgaactgggtcagatcaac

SEQ ID NO: 503 - RNA, 27 nt, synthetic construct
  misc_feature 1..27: note = synthetic construct
  source 1..27: mol_type = other RNA
ggatccacttgaactgggtcagatcaa

SEQ ID NO: 504 - RNA, 27 nt, synthetic construct
  misc_feature 1..27: note = synthetic construct
  source 1..27: mol_type = other RNA
tggatccacttgaactgggtcagatca

SEQ ID NO: 505 - RNA, 27 nt, synthetic construct
  misc_feature 1..27: note = synthetic construct
  source 1..27: mol_type = other RNA
gtggatccacttgaactgggtcagatc

SEQ ID NO: 506 - RNA, 27 nt, synthetic construct
  misc_feature 1..27: note = synthetic construct
  source 1..27: mol_type = other RNA
tgtggatccacttgaactgggtcagat

SEQ ID NO: 507 - RNA, 27 nt, synthetic construct
  misc_feature 1..27: note = synthetic construct
  source 1..27: mol_type = other RNA
atgtggatccacttgaactgggtcaga

SEQ ID NO: 508 - RNA, 27 nt, synthetic construct
  misc_feature 1..27: note = synthetic construct
  source 1..27: mol_type = other RNA
aatgtggatccacttgaactgggtcag

SEQ ID NO: 509 - RNA, 27 nt, synthetic construct
  misc_feature 1..27: note = synthetic construct
  source 1..27: mol_type = other RNA
caatgtggatccacttgaactgggtca

SEQ ID NO: 510 - RNA, 27 nt, synthetic construct
  misc_feature 1..27: note = synthetic construct
  source 1..27: mol_type = other RNA
tcaatgtggatccacttgaactgggtc

SEQ ID NO: 511 - RNA, 27 nt, synthetic construct
  misc_feature 1..27: note = synthetic construct
  source 1..27: mol_type = other RNA
ctcaatgtggatccacttgaactgggt

SEQ ID NO: 512 - RNA, 27 nt, synthetic construct
  misc_feature 1..27: note = synthetic construct
  source 1..27: mol_type = other RNA
cctcaatgtggatccacttgaactggg

SEQ ID NO: 513 - RNA, 27 nt, synthetic construct
  misc_feature 1..27: note = synthetic construct
  source 1..27: mol_type = other RNA
ccctcaatgtggatccacttgaactgg

SEQ ID NO: 514 - RNA, 27 nt, synthetic construct
  misc_feature 1..27: note = synthetic construct
  source 1..27: mol_type = other RNA
gccctcaatgtggatccacttgaactg

SEQ ID NO: 515 - RNA, 27 nt, synthetic construct
  misc_feature 1..27: note = synthetic construct
  source 1..27: mol_type = other RNA
ggccctcaatgtggatccacttgaact

SEQ ID NO: 516 - RNA, 27 nt, synthetic construct
  misc_feature 1..27: note = synthetic construct
  source 1..27: mol_type = other RNA
cggccctcaatgtggatccacttgaac

SEQ ID NO: 517 - RNA, 27 nt, synthetic construct
  misc_feature 1..27: note = synthetic construct
  source 1..27: mol_type = other RNA
ccggccctcaatgtggatccacttgaa

SEQ ID NO: 518 - RNA, 27 nt, synthetic construct
  misc_feature 1..27: note = synthetic construct
  source 1..27: mol_type = other RNA
tccggccctcaatgtggatccacttga

SEQ ID NO: 519 - RNA, 27 nt, synthetic construct
  misc_feature 1..27: note = synthetic construct
  source 1..27: mol_type = other RNA
ttccggccctcaatgtggatccacttg

SEQ ID NO: 520 - RNA, 27 nt, synthetic construct
  misc_feature 1..27: note = synthetic construct
  source 1..27: mol_type = other RNA
gttccggccctcaatgtggatccactt

SEQ ID NO: 521 - RNA, 27 nt, synthetic construct
  misc_feature 1..27: note = synthetic construct
  source 1..27: mol_type = other RNA
gcagcatcttcacctgctccgatgcgt

SEQ ID NO: 522 - RNA, 27 nt, synthetic construct
  misc_feature 1..27: note = synthetic construct
  source 1..27: mol_type = other RNA
tgcagcatcttcacctgctccgatgcg

SEQ ID NO: 523 - RNA, 27 nt, synthetic construct
  misc_feature 1..27: note = synthetic construct
  source 1..27: mol_type = other RNA
ctgcagcatcttcacctgctccgatgc

SEQ ID NO: 524 - RNA, 27 nt, synthetic construct
  misc_feature 1..27: note = synthetic construct
  source 1..27: mol_type = other RNA
gctgcagcatcttcacctgctccgatg

SEQ ID NO: 525 - RNA, 27 nt, synthetic construct
  misc_feature 1..27: note = synthetic construct
  source 1..27: mol_type = other RNA
cgctgcagcatcttcacctgctccgat

SEQ ID NO: 526 - RNA, 27 nt, synthetic construct
  misc_feature 1..27: note = synthetic construct
  source 1..27: mol_type = other RNA
ccgctgcagcatcttcacctgctccga

SEQ ID NO: 527 - RNA, 27 nt, synthetic construct
  misc_feature 1..27: note = synthetic construct
  source 1..27: mol_type = other RNA
tccgctgcagcatcttcacctgctccg

SEQ ID NO: 528 - RNA, 27 nt, synthetic construct
  misc_feature 1..27: note = synthetic construct
  source 1..27: mol_type = other RNA
atccgctgcagcatcttcacctgctcc

SEQ ID NO: 529 - RNA, 27 nt, synthetic construct
  misc_feature 1..27: note = synthetic construct
  source 1..27: mol_type = other RNA
tatccgctgcagcatcttcacctgctc

SEQ ID NO: 530 - RNA, 27 nt, synthetic construct
  misc_feature 1..27: note = synthetic construct
  source 1..27: mol_type = other RNA
ctatccgctgcagcatcttcacctgct

SEQ ID NO: 531 - RNA, 27 nt, synthetic construct
  misc_feature 1..27: note = synthetic construct
  source 1..27: mol_type = other RNA
tctatccgctgcagcatcttcacctgc

SEQ ID NO: 532 - RNA, 27 nt, synthetic construct
  misc_feature 1..27: note = synthetic construct
  source 1..27: mol_type = other RNA
gtctatccgctgcagcatcttcacctg

SEQ ID NO: 533 - RNA, 27 nt, synthetic construct
  misc_feature 1..27: note = synthetic construct
  source 1..27: mol_type = other RNA
cgtctatccgctgcagcatcttcacct

SEQ ID NO: 534 - RNA, 27 nt, synthetic construct
  misc_feature 1..27: note = synthetic construct
  source 1..27: mol_type = other RNA
gcgtctatccgctgcagcatcttcacc

SEQ ID NO: 535 - RNA, 27 nt, synthetic construct
  misc_feature 1..27: note = synthetic construct
  source 1..27: mol_type = other RNA
tgcgtctatccgctgcagcatcttcac

SEQ ID NO: 536 - RNA, 27 nt, synthetic construct
  misc_feature 1..27: note = synthetic construct
  source 1..27: mol_type = other RNA
gtgcgtctatccgctgcagcatcttca

SEQ ID NO: 537 - RNA, 27 nt, synthetic construct
  misc_feature 1..27: note = synthetic construct
  source 1..27: mol_type = other RNA
tgtgcgtctatccgctgcagcatcttc

SEQ ID NO: 538 - RNA, 27 nt, synthetic construct
  misc_feature 1..27: note = synthetic construct
  source 1..27: mol_type = other RNA
gtgtgcgtctatccgctgcagcatctt

SEQ ID NO: 539 - RNA, 27 nt, synthetic construct
  misc_feature 1..27: note = synthetic construct
  source 1..27: mol_type = other RNA
tgtgtgcgtctatccgctgcagcatct

SEQ ID NO: 540 - RNA, 27 nt, synthetic construct
  misc_feature 1..27: note = synthetic construct
  source 1..27: mol_type = other RNA
ttgtgtgcgtctatccgctgcagcatc

SEQ ID NO: 541 - RNA, 27 nt, synthetic construct
  misc_feature 1..27: note = synthetic construct
  source 1..27: mol_type = other RNA
gctctggaggctgcctggtgttgtgtg

SEQ ID NO: 542 - RNA, 27 nt, synthetic construct
  misc_feature 1..27: note = synthetic construct
  source 1..27: mol_type = other RNA
ttctgctctggaggctgcctggtgttg

SEQ ID NO: 543 - RNA, 27 nt, synthetic construct
  misc_feature 1..27: note = synthetic construct
  source 1..27: mol_type = other RNA
cttctgctctggaggctgcctggtgtt

SEQ ID NO: 544 - RNA, 27 nt, synthetic construct
  misc_feature 1..27: note = synthetic construct
  source 1..27: mol_type = other RNA
tcttctgctctggaggctgcctggtgt

SEQ ID NO: 545 - RNA, 27 nt, synthetic construct
  misc_feature 1..27: note = synthetic construct
  source 1..27: mol_type = other RNA
atcttctgctctggaggctgcctggtg

SEQ ID NO: 546 - RNA, 27 nt, synthetic construct
  misc_feature 1..27: note = synthetic construct
  source 1..27: mol_type = other RNA
acccggatcttctgctctggaggctgc

SEQ ID NO: 547 - RNA, 27 nt, synthetic construct
  misc_feature 1..27: note = synthetic construct
  source 1..27: mol_type = other RNA
cacccggatcttctgctctggaggctg

SEQ ID NO: 548 - RNA, 27 nt, synthetic construct
  misc_feature 1..27: note = synthetic construct
  source 1..27: mol_type = other RNA
acacccggatcttctgctctggaggct

SEQ ID NO: 549 - RNA, 27 nt, synthetic construct
  misc_feature 1..27: note = synthetic construct
  source 1..27: mol_type = other RNA
ccacggacacccggatcttctgctctg

SEQ ID NO: 550 - RNA, 27 nt, synthetic construct
  misc_feature 1..27: note = synthetic construct
  source 1..27: mol_type = other RNA
tccacggacacccggatcttctgctct

SEQ ID NO: 551 - RNA, 27 nt, synthetic construct
  misc_feature 1..27: note = synthetic construct
  source 1..27: mol_type = other RNA
ctctcgtggcttctccacctccacgga

SEQ ID NO: 552 - RNA, 27 nt, synthetic construct
  misc_feature 1..27: note = synthetic construct
  source 1..27: mol_type = other RNA
accacgtctccgtagccaaacagctgg

SEQ ID NO: 553 - RNA, 27 nt, synthetic construct
  misc_feature 1..27: note = synthetic construct
  source 1..27: mol_type = other RNA
caccacgtctccgtagccaaacagctg

SEQ ID NO: 554 - RNA, 27 nt, synthetic construct
  misc_feature 1..27: note = synthetic construct
  source 1..27: mol_type = other RNA
aacaccacgtctccgtagccaaacagc

SEQ ID NO: 555 - RNA, 27 nt, synthetic construct
  misc_feature 1..27: note = synthetic construct
  source 1..27: mol_type = other RNA
aaacaccacgtctccgtagccaaacag

SEQ ID NO: 556 - RNA, 27 nt, synthetic construct
  misc_feature 1..27: note = synthetic construct
  source 1..27: mol_type = other RNA
caaacaccacgtctccgtagccaaaca

SEQ ID NO: 557 - RNA, 27 nt, synthetic construct
  misc_feature 1..27: note = synthetic construct
  source 1..27: mol_type = other RNA
acaaacaccacgtctccgtagccaaac

SEQ ID NO: 558 - RNA, 27 nt, synthetic construct
  misc_feature 1..27: note = synthetic construct
  source 1..27: mol_type = other RNA
gacaaacaccacgtctccgtagccaaa

SEQ ID NO: 559 - RNA, 27 nt, synthetic construct
  misc_feature 1..27: note = synthetic construct
  source 1..27: mol_type = other RNA
tgacaaacaccacgtctccgtagccaa

SEQ ID NO: 560 - RNA, 27 nt, synthetic construct
  misc_feature 1..27: note = synthetic construct
  source 1..27: mol_type = other RNA
ctgacaaacaccacgtctccgtagcca

SEQ ID NO: 561 - RNA, 27 nt, synthetic construct
  misc_feature 1..27: note = synthetic construct
  source 1..27: mol_type = other RNA
gctgacaaacaccacgtctccgtagcc

SEQ ID NO: 562 - RNA, 27 nt, synthetic construct
  misc_feature 1..27: note = synthetic construct
  source 1..27: mol_type = other RNA
tgctgacaaacaccacgtctccgtagc

SEQ ID NO: 563 - RNA, 27 nt, synthetic construct
  misc_feature 1..27: note = synthetic construct
  source 1..27: mol_type = other RNA
ttgctgacaaacaccacgtctccgtag

SEQ ID NO: 564 - RNA, 27 nt, synthetic construct
  misc_feature 1..27: note = synthetic construct
  source 1..27: mol_type = other RNA
tttgctgacaaacaccacgtctccgta

SEQ ID NO: 565 - RNA, 27 nt, synthetic construct
  misc_feature 1..27: note = synthetic construct
  source 1..27: mol_type = other RNA
ctttgctgacaaacaccacgtctccgt

SEQ ID NO: 566 - RNA, 27 nt, synthetic construct
  misc_feature 1..27: note = synthetic construct
  source 1..27: mol_type = other RNA
tctttgctgacaaacaccacgtctccg

SEQ ID NO: 567 - RNA, 27 nt, synthetic construct
  misc_feature 1..27: note = synthetic construct
  source 1..27: mol_type = other RNA
atctttgctgacaaacaccacgtctcc

SEQ ID NO: 568 - RNA, 27 nt, synthetic construct
  misc_feature 1..27: note = synthetic construct
  source 1..27: mol_type = other RNA
catctttgctgacaaacaccacgtctc

SEQ ID NO: 569 - RNA, 27 nt, synthetic construct
  misc_feature 1..27: note = synthetic construct
  source 1..27: mol_type = other RNA
acatctttgctgacaaacaccacgtct

SEQ ID NO: 570 - RNA, 27 nt, synthetic construct
  misc_feature 1..27: note = synthetic construct
  source 1..27: mol_type = other RNA
cacatctttgctgacaaacaccacgtc

SEQ ID NO: 571 - RNA, 27 nt, synthetic construct
  misc_feature 1..27: note = synthetic construct
  source 1..27: mol_type = other RNA
ccacatctttgctgacaaacaccacgt

SEQ ID NO: 572 - RNA, 27 nt, synthetic construct
  misc_feature 1..27: note = synthetic construct
  source 1..27: mol_type = other RNA
gccacatctttgctgacaaacaccacg

SEQ ID NO: 573 - RNA, 27 nt, synthetic construct
  misc_feature 1..27: note = synthetic construct
  source 1..27: mol_type = other RNA
ggccacatctttgctgacaaacaccac

SEQ ID NO: 574 - RNA, 27 nt, synthetic construct
  misc_feature 1..27: note = synthetic construct
  source 1..27: mol_type = other RNA
tggccacatctttgctgacaaacacca

SEQ ID NO: 575 - RNA, 27 nt, synthetic construct
  misc_feature 1..27: note = synthetic construct
  source 1..27: mol_type = other RNA
ttggccacatctttgctgacaaacacc

SEQ ID NO: 576 - RNA, 27 nt, synthetic construct
  misc_feature 1..27: note = synthetic construct
  source 1..27: mol_type = other RNA
cttggccacatctttgctgacaaacac

SEQ ID NO: 577 - RNA, 27 nt, synthetic construct
  misc_feature 1..27: note = synthetic construct
  source 1..27: mol_type = other RNA
gcttggccacatctttgctgacaaaca

SEQ ID NO: 578 - RNA, 27 nt, synthetic construct
  misc_feature 1..27: note = synthetic construct
  source 1..27: mol_type = other RNA
tgcttggccacatctttgctgacaaac

SEQ ID NO: 579 - RNA, 27 nt, synthetic construct
  misc_feature 1..27: note = synthetic construct
  source 1..27: mol_type = other RNA
gtgcttggccacatctttgctgacaaa

SEQ ID NO: 580 - RNA, 27 nt, synthetic construct
  misc_feature 1..27: note = synthetic construct
  source 1..27: mol_type = other RNA
agtgcttggccacatctttgctgacaa

SEQ ID NO: 581 - RNA, 27 nt, synthetic construct
  misc_feature 1..27: note = synthetic construct
  source 1..27: mol_type = other RNA
aagtgcttggccacatctttgctgaca

SEQ ID NO: 582 - RNA, 27 nt, synthetic construct
  misc_feature 1..27: note = synthetic construct
  source 1..27: mol_type = other RNA
caagtgcttggccacatctttgctgac

SEQ ID NO: 583 - RNA, 27 nt, synthetic construct
  misc_feature 1..27: note = synthetic construct
  source 1..27: mol_type = other RNA
ccaagtgcttggccacatctttgctga

SEQ ID NO: 584 - RNA, 27 nt, synthetic construct
  misc_feature 1..27: note = synthetic construct
  source 1..27: mol_type = other RNA
cccaagtgcttggccacatctttgctg

SEQ ID NO: 585 - RNA, 27 nt, synthetic construct
  misc_feature 1..27: note = synthetic construct
  source 1..27: mol_type = other RNA
aaccccaagtgcttggccacatctttg

SEQ ID NO: 586 - RNA, 27 nt, synthetic construct
  misc_feature 1..27: note = synthetic construct
  source 1..27: mol_type = other RNA
gaaccccaagtgcttggccacatcttt

SEQ ID NO: 587 - RNA, 27 nt, synthetic construct
  misc_feature 1..27: note = synthetic construct
  source 1..27: mol_type = other RNA
ggaaccccaagtgcttggccacatctt

SEQ ID NO: 588 - RNA, 27 nt, synthetic construct
  misc_feature 1..27: note = synthetic construct
  source 1..27: mol_type = other RNA
tggaaccccaagtgcttggccacatct

SEQ ID NO: 589 - RNA, 27 nt, synthetic construct
  misc_feature 1..27: note = synthetic construct
  source 1..27: mol_type = other RNA
actggaaccccaagtgcttggccacat

SEQ ID NO: 590 - RNA, 27 nt, synthetic construct
  misc_feature 1..27: note = synthetic construct
  source 1..27: mol_type = other RNA
gactggaaccccaagtgcttggccaca

SEQ ID NO: 591 - RNA, 27 nt, synthetic construct
  misc_feature 1..27: note = synthetic construct
  source 1..27: mol_type = other RNA
tgactggaaccccaagtgcttggccac

SEQ ID NO: 592 - RNA, 27 nt, synthetic construct
  misc_feature 1..27: note = synthetic construct
  source 1..27: mol_type = other RNA
gctgactggaaccccaagtgcttggcc

SEQ ID NO: 593 - RNA, 27 nt, synthetic construct
  misc_feature 1..27: note = synthetic construct
  source 1..27: mol_type = other RNA
tgctgactggaaccccaagtgcttggc

SEQ ID NO: 594 - RNA, 27 nt, synthetic construct
  misc_feature 1..27: note = synthetic construct
  source 1..27: mol_type = other RNA
ctgctgactggaaccccaagtgcttgg

SEQ ID NO: 595 - RNA, 27 nt, synthetic construct
  misc_feature 1..27: note = synthetic construct
  source 1..27: mol_type = other RNA
tctgctgactggaaccccaagtgcttg

SEQ ID NO: 596 - RNA, 27 nt, synthetic construct
  misc_feature 1..27: note = synthetic construct
  source 1..27: mol_type = other RNA
ctctgctgactggaaccccaagtgctt

SEQ ID NO: 597 - RNA, 27 nt, synthetic construct
  misc_feature 1..27: note = synthetic construct
  source 1..27: mol_type = other RNA
cctctgctgactggaaccccaagtgct

SEQ ID NO: 598 - RNA, 27 nt, synthetic construct
  misc_feature 1..27: note = synthetic construct
  source 1..27: mol_type = other RNA
ttcctctgctgactggaaccccaagtg

SEQ ID NO: 599 - RNA, 27 nt, synthetic construct
  misc_feature 1..27: note = synthetic construct
  source 1..27: mol_type = other RNA
cttcctctgctgactggaaccccaagt

SEQ ID NO: 600 - RNA, 27 nt, synthetic construct
  misc_feature 1..27: note = synthetic construct
  source 1..27: mol_type = other RNA
ctcacacgaccatacaagcccctcaag

SEQ ID NO: 601 - RNA, 27 nt, synthetic construct
  misc_feature 1..27: note = synthetic construct
  source 1..27: mol_type = other RNA
cctcacacgaccatacaagcccctcaa

SEQ ID NO: 602 - RNA, 27 nt, synthetic construct
  misc_feature 1..27: note = synthetic construct
  source 1..27: mol_type = other RNA
tcctcacacgaccatacaagcccctca

SEQ ID NO: 603 - RNA, 27 nt, synthetic construct
  misc_feature 1..27: note = synthetic construct
  source 1..27: mol_type = other RNA
ttcctcacacgaccatacaagcccctc

SEQ ID NO: 604 - RNA, 27 nt, synthetic construct
  misc_feature 1..27: note = synthetic construct
  source 1..27: mol_type = other RNA
tttcctcacacgaccatacaagcccct

SEQ ID NO: 605 - RNA, 27 nt, synthetic construct
  misc_feature 1..27: note = synthetic construct
  source 1..27: mol_type = other RNA
ctttcctcacacgaccatacaagcccc

SEQ ID NO: 606 - RNA, 27 nt, synthetic construct
  misc_feature 1..27: note = synthetic construct
  source 1..27: mol_type = other RNA
cctttcctcacacgaccatacaagccc

SEQ ID NO: 607 - RNA, 27 nt, synthetic construct
  misc_feature 1..27: note = synthetic construct
  source 1..27: mol_type = other RNA
ccctttcctcacacgaccatacaagcc

SEQ ID NO: 608 - RNA, 27 nt, synthetic construct
  misc_feature 1..27: note = synthetic construct
  source 1..27: mol_type = other RNA
cccctttcctcacacgaccatacaagc

SEQ ID NO: 609 - RNA, 27 nt, synthetic construct
  misc_feature 1..27: note = synthetic construct
  source 1..27: mol_type = other RNA
gcccctttcctcacacgaccatacaag

SEQ ID NO: 610 - RNA, 27 nt, synthetic construct
  misc_feature 1..27: note = synthetic construct
  source 1..27: mol_type = other RNA
agcccctttcctcacacgaccatacaa

SEQ ID NO: 611 - RNA, 27 nt, synthetic construct
  misc_feature 1..27: note = synthetic construct
  source 1..27: mol_type = other RNA
cagcccctttcctcacacgaccataca

SEQ ID NO: 612 - RNA, 27 nt, synthetic construct
  misc_feature 1..27: note = synthetic construct
  source 1..27: mol_type = other RNA
acagcccctttcctcacacgaccatac

SEQ ID NO: 613 - RNA, 27 nt, synthetic construct
  misc_feature 1..27: note = synthetic construct
  source 1..27: mol_type = other RNA
cacagcccctttcctcacacgaccata

SEQ ID NO: 614 - RNA, 27 nt, synthetic construct
  misc_feature 1..27: note = synthetic construct
  source 1..27: mol_type = other RNA
gcacagcccctttcctcacacgaccat

SEQ ID NO: 615 - RNA, 27 nt, synthetic construct
  misc_feature 1..27: note = synthetic construct
  source 1..27: mol_type = other RNA
acaagcacagcccctttcctcacacga

SEQ ID NO: 616 - RNA, 27 nt, synthetic construct
  misc_feature 1..27: note = synthetic construct
  source 1..27: mol_type = other RNA
gacaagcacagcccctttcctcacacg

SEQ ID NO: 617 - RNA, 27 nt, synthetic construct
  misc_feature 1..27: note = synthetic construct
  source 1..27: mol_type = other RNA
acagacaagcacagcccctttcctcac

SEQ ID NO: 618 - RNA, 27 nt, synthetic construct
  misc_feature 1..27: note = synthetic construct
  source 1..27: mol_type = other RNA
cacagacaagcacagcccctttcctca

SEQ ID NO: 619 - RNA, 27 nt, synthetic construct
  misc_feature 1..27: note = synthetic construct
  source 1..27: mol_type = other RNA
gcacagacaagcacagcccctttcctc

SEQ ID NO: 620 - RNA, 27 nt, synthetic construct
  misc_feature 1..27: note = synthetic construct
  source 1..27: mol_type = other RNA
aggcacagacaagcacagcccctttcc

SEQ ID NO: 621 - RNA, 27 nt, synthetic construct
  misc_feature 1..27: note = synthetic construct
  source 1..27: mol_type = other RNA
ccaggcacagacaagcacagccccttt

SEQ ID NO: 622 - RNA, 27 nt, synthetic construct
  misc_feature 1..27: note = synthetic construct
  source 1..27: mol_type = other RNA
cccaggcacagacaagcacagcccctt

SEQ ID NO: 623 - RNA, 27 nt, synthetic construct
  misc_feature 1..27: note = synthetic construct
  source 1..27: mol_type = other RNA
gggtggcgggaaagcatccgagtggag

SEQ ID NO: 624 - RNA, 27 nt, synthetic construct
  misc_feature 1..27: note = synthetic construct
  source 1..27: mol_type = other RNA
cggaggcattgaaggtgtctccagctc

SEQ ID NO: 625 - RNA, 27 nt, synthetic construct
  misc_feature 1..27: note = synthetic construct
  source 1..27: mol_type = other RNA
acggaggcattgaaggtgtctccagct

SEQ ID NO: 626 - RNA, 27 nt, synthetic construct
  misc_feature 1..27: note = synthetic construct
  source 1..27: mol_type = other RNA
gacggaggcattgaaggtgtctccagc

SEQ ID NO: 627 - RNA, 27 nt, synthetic construct
  misc_feature 1..27: note = synthetic construct
  source 1..27: mol_type = other RNA
tgacggaggcattgaaggtgtctccag

SEQ ID NO: 628 - RNA, 27 nt, synthetic construct
  misc_feature 1..27: note = synthetic construct
  source 1..27: mol_type = other RNA
atgacggaggcattgaaggtgtctcca

SEQ ID NO: 629 - RNA, 27 nt, synthetic construct
  misc_feature 1..27: note = synthetic construct
  source 1..27: mol_type = other RNA
gatgacggaggcattgaaggtgtctcc

SEQ ID NO: 630 - RNA, 27 nt, synthetic construct
  misc_feature 1..27: note = synthetic construct
  source 1..27: mol_type = other RNA
agatgacggaggcattgaaggtgtctc

SEQ ID NO: 631 - RNA, 27 nt, synthetic construct
  misc_feature 1..27: note = synthetic construct
  source 1..27: mol_type = other RNA
aagatgacggaggcattgaaggtgtct

SEQ ID NO: 632 - RNA, 27 nt, synthetic construct
  misc_feature 1..27: note = synthetic construct
  source 1..27: mol_type = other RNA
gaagatgacggaggcattgaaggtgtc

SEQ ID NO: 633 - RNA, 27 nt, synthetic construct
  misc_feature 1..27: note = synthetic construct
  source 1..27: mol_type = other RNA
tgaagatgacggaggcattgaaggtgt

SEQ ID NO: 634 - RNA, 27 nt, synthetic construct
  misc_feature 1..27: note = synthetic construct
  source 1..27: mol_type = other RNA
ctgaagatgacggaggcattgaaggtg

SEQ ID NO: 635 - RNA, 27 nt, synthetic construct
  misc_feature 1..27: note = synthetic construct
  source 1..27: mol_type = other RNA
gctgaagatgacggaggcattgaaggt

SEQ ID NO: 636 - RNA, 27 nt, synthetic construct
  misc_feature 1..27: note = synthetic construct
  source 1..27: mol_type = other RNA
ggctgaagatgacggaggcattgaagg

SEQ ID NO: 637 - RNA, 27 nt, synthetic construct
  misc_feature 1..27: note = synthetic construct
  source 1..27: mol_type = other RNA
aggctgaagatgacggaggcattgaag

SEQ ID NO: 638 - RNA, 27 nt, synthetic construct
  misc_feature 1..27: note = synthetic construct
  source 1..27: mol_type = other RNA
gaggctgaagatgacggaggcattgaa

SEQ ID NO: 639 - RNA, 27 nt, synthetic construct
  misc_feature 1..27: note = synthetic construct
  source 1..27: mol_type = other RNA
agaggctgaagatgacggaggcattga

SEQ ID NO: 640 - RNA, 27 nt, synthetic construct
  misc_feature 1..27: note = synthetic construct
  source 1..27: mol_type = other RNA
gagaggctgaagatgacggaggcattg

SEQ ID NO: 641 - RNA, 27 nt, synthetic construct
  misc_feature 1..27: note = synthetic construct
  source 1..27: mol_type = other RNA
ggagaggctgaagatgacggaggcatt

SEQ ID NO: 642 - RNA, 27 nt, synthetic construct
  misc_feature 1..27: note = synthetic construct
  source 1..27: mol_type = other RNA
tgggagaggctgaagatgacggaggca

SEQ ID NO: 643 - RNA, 27 nt, synthetic construct
  misc_feature 1..27: note = synthetic construct
  source 1..27: mol_type = other RNA
tcagtgcttcctgcacgctcctcccct

SEQ ID NO: 644 - RNA, 27 nt, synthetic construct
  misc_feature 1..27: note = synthetic construct
  source 1..27: mol_type = other RNA
tctcagtgcttcctgcacgctcctccc

SEQ ID NO: 645 - RNA, 27 nt, synthetic construct
  misc_feature 1..27: note = synthetic construct
  source 1..27: mol_type = other RNA
atctcagtgcttcctgcacgctcctcc

SEQ ID NO: 646 - RNA, 27 nt, synthetic construct
  misc_feature 1..27: note = synthetic construct
  source 1..27: mol_type = other RNA
aatctcagtgcttcctgcacgctcctc

SEQ ID NO: 647 - RNA, 27 nt, synthetic construct
  misc_feature 1..27: note = synthetic construct
  source 1..27: mol_type = other RNA
gaatctcagtgcttcctgcacgctcct

SEQ ID NO: 648 - RNA, 27 nt, synthetic construct
  misc_feature 1..27: note = synthetic construct
  source 1..27: mol_type = other RNA
cgaatctcagtgcttcctgcacgctcc

SEQ ID NO: 649 - RNA, 27 nt, synthetic construct
  misc_feature 1..27: note = synthetic construct
  source 1..27: mol_type = other RNA
ccgaatctcagtgcttcctgcacgctc

SEQ ID NO: 650 - RNA, 27 nt, synthetic construct
  misc_feature 1..27: note = synthetic construct
  source 1..27: mol_type = other RNA
cccgaatctcagtgcttcctgcacgct

SEQ ID NO: 651 - RNA, 27 nt, synthetic construct
  misc_feature 1..27: note = synthetic construct
  source 1..27: mol_type = other RNA
acccgaatctcagtgcttcctgcacgc

SEQ ID NO: 652 - RNA, 27 nt, synthetic construct
  misc_feature 1..27: note = synthetic construct
  source 1..27: mol_type = other RNA
cacccgaatctcagtgcttcctgcacg

SEQ ID NO: 653 - RNA, 27 nt, synthetic construct
  misc_feature 1..27: note = synthetic construct
  source 1..27: mol_type = other RNA
gcacccgaatctcagtgcttcctgcac

SEQ ID NO: 654 - RNA, 27 nt, synthetic construct
  misc_feature 1..27: note = synthetic construct
  source 1..27: mol_type = other RNA
ggcacccgaatctcagtgcttcctgca

SEQ ID NO: 655 - RNA, 27 nt, synthetic construct
  misc_feature 1..27: note = synthetic construct
  source 1..27: mol_type = other RNA
tggcacccgaatctcagtgcttcctgc

SEQ ID NO: 656 - RNA, 27 nt, synthetic construct
  misc_feature 1..27: note = synthetic construct
  source 1..27: mol_type = other RNA
tcacacgatgccatcaaagccctgcag

SEQ ID NO: 657 - RNA, 27 nt, synthetic construct
  misc_feature 1..27: note = synthetic construct
  source 1..27: mol_type = other RNA
tctcacacgatgccatcaaagccctgc

SEQ ID NO: 658 - RNA, 27 nt, synthetic construct
  misc_feature 1..27: note = synthetic construct
  source 1..27: mol_type = other RNA
ctctcacacgatgccatcaaagccctg

SEQ ID NO: 659 - RNA, 27 nt, synthetic construct
  misc_feature 1..27: note = synthetic construct
  source 1..27: mol_type = other RNA
gctctcacacgatgccatcaaagccct

SEQ ID NO: 660 - RNA, 27 nt, synthetic construct
  misc_feature 1..27: note = synthetic construct
  source 1..27: mol_type = other RNA
cctgtggggaacacaggacacaggcag

SEQ ID NO: 661 - RNA, 27 nt, synthetic construct
  misc_feature 1..27: note = synthetic construct
  source 1..27: mol_type = other RNA
tccctgtggggaacacaggacacaggc

SEQ ID NO: 662 - RNA, 27 nt, synthetic construct
  misc_feature 1..27: note = synthetic construct
  source 1..27: mol_type = other RNA
tctccctgtggggaacacaggacacag

SEQ ID NO: 663 - RNA, 27 nt, synthetic construct
  misc_feature 1..27: note = synthetic construct
  source 1..27: mol_type = other RNA
tcgaagagtcagagcctcaggaatgcc

SEQ ID NO: 664 - RNA, 27 nt, synthetic construct
  misc_feature 1..27: note = synthetic construct
  source 1..27: mol_type = other RNA
atcgaagagtcagagcctcaggaatgc

SEQ ID NO: 665 - RNA, 27 nt, synthetic construct
  misc_feature 1..27: note = synthetic construct
  source 1..27: mol_type = other RNA
gatcgaagagtcagagcctcaggaatg

SEQ ID NO: 666 - RNA, 27 nt, synthetic construct
  misc_feature 1..27: note = synthetic construct
  source 1..27: mol_type = other RNA
ggcggagaggttaatttggggaatgga

SEQ ID NO: 667 - RNA, 27 nt, synthetic construct
  misc_feature 1..27: note = synthetic construct
  source 1..27: mol_type = other RNA
gggcggagaggttaatttggggaatgg

SEQ ID NO: 668 - RNA, 27 nt, synthetic construct
  misc_feature 1..27: note = synthetic construct
  source 1..27: mol_type = other RNA
tgggcggagaggttaatttggggaatg

SEQ ID NO: 669 - RNA, 27 nt, synthetic construct
  misc_feature 1..27: note = synthetic construct
  source 1..27: mol_type = other RNA
atagagtctgcacaacgcagggccccg

SEQ ID NO: 670 - RNA, 27 nt, synthetic construct
  misc_feature 1..27: note = synthetic construct
  source 1..27: mol_type = other RNA
aatagagtctgcacaacgcagggcccc

SEQ ID NO: 671 - RNA, 27 nt, synthetic construct
  misc_feature 1..27: note = synthetic construct
  source 1..27: mol_type = other RNA
gaatagagtctgcacaacgcagggccc

SEQ ID NO: 672 - RNA, 27 nt, synthetic construct
  misc_feature 1..27: note = synthetic construct
  source 1..27: mol_type = other RNA
ggaatagagtctgcacaacgcagggcc

SEQ ID NO: 673 - RNA, 27 nt, synthetic construct
  misc_feature 1..27: note = synthetic construct
  source 1..27: mol_type = other RNA
gggaatagagtctgcacaacgcagggc

SEQ ID NO: 674 - RNA, 27 nt, synthetic construct
  misc_feature 1..27: note = synthetic construct
  source 1..27: mol_type = other RNA
tgggaatagagtctgcacaacgcaggg

SEQ ID NO: 675 - RNA, 27 nt, synthetic construct
  misc_feature 1..27: note = synthetic construct
  source 1..27: mol_type = other RNA
gtgggaatagagtctgcacaacgcagg

SEQ ID NO: 676 - RNA, 27 nt, synthetic construct
  misc_feature 1..27: note = synthetic construct
  source 1..27: mol_type = other RNA
tgtgggaatagagtctgcacaacgcag

SEQ ID NO: 677 - RNA, 27 nt, synthetic construct
  misc_feature 1..27: note = synthetic construct
  source 1..27: mol_type = other RNA
ctgtgggaatagagtctgcacaacgca

SEQ ID NO: 678 - RNA, 27 nt, synthetic construct
  misc_feature 1..27: note = synthetic construct
  source 1..27: mol_type = other RNA
gctgtgggaatagagtctgcacaacgc

SEQ ID NO: 679 - RNA, 27 nt, synthetic construct
  misc_feature 1..27: note = synthetic construct
  source 1..27: mol_type = other RNA
agctgtgggaatagagtctgcacaacg

SEQ ID NO: 680 - RNA, 27 nt, synthetic construct
  misc_feature 1..27: note = synthetic construct
  source 1..27: mol_type = other RNA
gagctgtgggaatagagtctgcacaac

SEQ ID NO: 681 - RNA, 27 nt, synthetic construct
  misc_feature 1..27: note = synthetic construct
  source 1..27: mol_type = other RNA
ggtgtggactcccagcttctgagctgt

SEQ ID NO: 682 - RNA, 27 nt, synthetic construct
  misc_feature 1..27: note = synthetic construct
  source 1..27: mol_type = other RNA
tcagcggtgtggactcccagcttctga

SEQ ID NO: 683 - RNA, 27 nt, synthetic construct
  misc_feature 1..27: note = synthetic construct
  source 1..27: mol_type = other RNA
aatcacaggctggtgggcagggcagag

SEQ ID NO: 684 - RNA, 27 nt, synthetic construct
  misc_feature 1..27: note = synthetic construct
  source 1..27: mol_type = other RNA
tcaaatcacaggctggtgggcagggca

SEQ ID NO: 685 - RNA, 27 nt, synthetic construct
  misc_feature 1..27: note = synthetic construct
  source 1..27: mol_type = other RNA
atcaaatcacaggctggtgggcagggc

SEQ ID NO: 686 - RNA, 27 nt, synthetic construct
  misc_feature 1..27: note = synthetic construct
  source 1..27: mol_type = other RNA
catcaaatcacaggctggtgggcaggg

SEQ ID NO: 687 - RNA, 27 nt, synthetic construct
  misc_feature 1..27: note = synthetic construct
  source 1..27: mol_type = other RNA
cccatcaaatcacaggctggtgggcag

SEQ ID NO: 688 - RNA, 27 nt, synthetic construct
  misc_feature 1..27: note = synthetic construct
  source 1..27: mol_type = other RNA
ccccatcaaatcacaggctggtgggca

SEQ ID NO: 689 - RNA, 27 nt, synthetic construct
  misc_feature 1..27: note = synthetic construct
  source 1..27: mol_type = other RNA
actttcaggctctggggcagtcagcgg

SEQ ID NO: 690 - RNA, 27 nt, synthetic construct
  misc_feature 1..27: note = synthetic construct
  source 1..27: mol_type = other RNA
gagactttcaggctctggggcagtcag

SEQ ID NO: 691 - RNA, 27 nt, synthetic construct
  misc_feature 1..27: note = synthetic construct
  source 1..27: mol_type = other RNA
tgagactttcaggctctggggcagtca

SEQ ID NO: 692 - RNA, 27 nt, synthetic construct
  misc_feature 1..27: note = synthetic construct
  source 1..27: mol_type = other RNA
gtgagactttcaggctctggggcagtc

SEQ ID NO: 693 - RNA, 27 nt, synthetic construct
  misc_feature 1..27: note = synthetic construct
  source 1..27: mol_type = other RNA
ggtgagactttcaggctctggggcagt

SEQ ID NO: 694 - RNA, 27 nt, synthetic construct
  misc_feature 1..27: note = synthetic construct
  source 1..27: mol_type = other RNA
gggtgagactttcaggctctggggcag

SEQ ID NO: 695 - RNA, 27 nt, synthetic construct
  misc_feature 1..27: note = synthetic construct
  source 1..27: mol_type = other RNA
agggtgagactttcaggctctggggca

SEQ ID NO: 696 - RNA, 27 nt, synthetic construct
  misc_feature 1..27: note = synthetic construct
  source 1..27: mol_type = other RNA
aagggtgagactttcaggctctggggc

SEQ ID NO: 697 - RNA, 27 nt, synthetic construct
  misc_feature 1..27: note = synthetic construct
  source 1..27: mol_type = other RNA
caagggtgagactttcaggctctgggg

SEQ ID NO: 698 - RNA, 27 nt, synthetic construct
  misc_feature 1..27: note = synthetic construct
  source 1..27: mol_type = other RNA
ccaagggtgagactttcaggctctggg

SEQ ID NO: 699 - RNA, 27 nt, synthetic construct
  misc_feature 1..27: note = synthetic construct
  source 1..27: mol_type = other RNA
tccaagggtgagactttcaggctctgg

SEQ ID NO: 700 - RNA, 27 nt, synthetic construct
  misc_feature 1..27: note = synthetic construct
  source 1..27: mol_type = other RNA
ctccaagggtgagactttcaggctctg

SEQ ID NO: 701 - RNA, 27 nt, synthetic construct
  misc_feature 1..27: note = synthetic construct
  source 1..27: mol_type = other RNA
acgcccttaattccaaggtgggctcca

SEQ ID NO: 702 - RNA, 27 nt, synthetic construct
  misc_feature 1..27: note = synthetic construct
  source 1..27: mol_type = other RNA
gcacgcccttaattccaaggtgggctc

SEQ ID NO: 703 - RNA, 27 nt, synthetic construct
  misc_feature 1..27: note = synthetic construct
  source 1..27: mol_type = other RNA
ctgggtcacatttgtggctgaggcacg

SEQ ID NO: 704 - RNA, 27 nt, synthetic construct
  misc_feature 1..27: note = synthetic construct
  source 1..27: mol_type = other RNA
cctgggtcacatttgtggctgaggcac

SEQ ID NO: 705 - RNA, 27 nt, synthetic construct
  misc_feature 1..27: note = synthetic construct
  source 1..27: mol_type = other RNA
tcctgggtcacatttgtggctgaggca

SEQ ID NO: 706 - RNA, 27 nt, synthetic construct
  misc_feature 1..27: note = synthetic construct
  source 1..27: mol_type = other RNA
atcctgggtcacatttgtggctgaggc

SEQ ID NO: 707 - RNA, 27 nt, synthetic construct
  misc_feature 1..27: note = synthetic construct
  source 1..27: mol_type = other RNA
tatcctgggtcacatttgtggctgagg

SEQ ID NO: 708 - RNA, 27 nt, synthetic construct
  misc_feature 1..27: note = synthetic construct
  source 1..27: mol_type = other RNA
gtatcctgggtcacatttgtggctgag

SEQ ID NO: 709 - RNA, 27 nt, synthetic construct
  misc_feature 1..27: note = synthetic construct
  source 1..27: mol_type = other RNA
caacactctgtatcctgggtcacattt

SEQ ID NO: 710 - RNA, 27 nt, synthetic construct
  misc_feature 1..27: note = synthetic construct
  source 1..27: mol_type = other RNA
ccaattccaatatgtgttccagatcgg

SEQ ID NO: 711 - RNA, 27 nt, synthetic construct
  misc_feature 1..27: note = synthetic construct
  source 1..27: mol_type = other RNA
cccaattccaatatgtgttccagatcg

SEQ ID NO: 712 - RNA, 27 nt, synthetic construct
  misc_feature 1..27: note = synthetic construct
  source 1..27: mol_type = other RNA
ccccaattccaatatgtgttccagatc

SEQ ID NO: 713 - RNA, 27 nt, synthetic construct
  misc_feature 1..27: note = synthetic construct
  source 1..27: mol_type = other RNA
gccccaattccaatatgtgttccagat

SEQ ID NO: 714 - RNA, 27 nt, synthetic construct
  misc_feature 1..27: note = synthetic construct
  source 1..27: mol_type = other RNA
ggccccaattccaatatgtgttccaga

SEQ ID NO: 715 - RNA, 27 nt, synthetic construct
  misc_feature 1..27: note = synthetic construct
  source 1..27: mol_type = other RNA
tggccccaattccaatatgtgttccag

SEQ ID NO: 716 - RNA, 27 nt, synthetic construct
  misc_feature 1..27: note = synthetic construct
  source 1..27: mol_type = other RNA
ttggccccaattccaatatgtgttcca

SEQ ID NO: 717 - RNA, 27 nt, synthetic construct
  misc_feature 1..27: note = synthetic construct
  source 1..27: mol_type = other RNA
gttggccccaattccaatatgtgttcc

SEQ ID NO: 718 - RNA, 27 nt, synthetic construct
  misc_feature 1..27: note = synthetic construct
  source 1..27: mol_type = other RNA
agttggccccaattccaatatgtgttc

SEQ ID NO: 719 - RNA, 27 nt, synthetic construct
  misc_feature 1..27: note = synthetic construct
  source 1..27: mol_type = other RNA
gagttggccccaattccaatatgtgtt

SEQ ID NO: 720 - RNA, 27 nt, synthetic construct
  misc_feature 1..27: note = synthetic construct
  source 1..27: mol_type = other RNA
tggagttggccccaattccaatatgtg

SEQ ID NO: 721 - RNA, 27 nt, synthetic construct
  misc_feature 1..27: note = synthetic construct
  source 1..27: mol_type = other RNA
ttggagttggccccaattccaatatgt

SEQ ID NO: 722 - RNA, 27 nt, synthetic construct
  misc_feature 1..27: note = synthetic construct
  source 1..27: mol_type = other RNA
attggagttggccccaattccaatatg

SEQ ID NO: 723 - RNA, 27 nt, synthetic construct
  misc_feature 1..27: note = synthetic construct
  source 1..27: mol_type = other RNA
tattggagttggccccaattccaatat

SEQ ID NO: 724 - RNA, 27 nt, synthetic construct
  misc_feature 1..27: note = synthetic construct
  source 1..27: mol_type = other RNA
atattggagttggccccaattccaata

SEQ ID NO: 725 - RNA, 27 nt, synthetic construct
  misc_feature 1..27: note = synthetic construct
  source 1..27: mol_type = other RNA
tatattggagttggccccaattccaat

SEQ ID NO: 726 - RNA, 27 nt, synthetic construct
  misc_feature 1..27: note = synthetic construct
  source 1..27: mol_type = other RNA
ctatattggagttggccccaattccaa

SEQ ID NO: 727 - RNA, 27 nt, synthetic construct
  misc_feature 1..27: note = synthetic construct
  source 1..27: mol_type = other RNA
cctatattggagttggccccaattcca

SEQ ID NO: 728 - RNA, 27 nt, synthetic construct
  misc_feature 1..27: note = synthetic construct
  source 1..27: mol_type = other RNA
ccaccctatattggagttggccccaat

SEQ ID NO: 729 - RNA, 27 nt, synthetic construct
  misc_feature 1..27: note = synthetic construct
  source 1..27: mol_type = other RNA
atgctctttacattataaggccttacc

SEQ ID NO: 730 - RNA, 27 nt, synthetic construct
  misc_feature 1..27: note = synthetic construct
  source 1..27: mol_type = other RNA
tatgctctttacattataaggccttac

SEQ ID NO: 731 - RNA, 27 nt, synthetic construct
  misc_feature 1..27: note = synthetic construct
  source 1..27: mol_type = other RNA
atatgctctttacattataaggcctta

SEQ ID NO: 732 - RNA, 27 nt, synthetic construct
  misc_feature 1..27: note = synthetic construct
  source 1..27: mol_type = other RNA
tatatgctctttacattataaggcctt

SEQ ID NO: 733 - RNA, 27 nt, synthetic construct
  misc_feature 1..27: note = synthetic construct
  source 1..27: mol_type = other RNA
ttatatgctctttacattataaggcct

SEQ ID NO: 734 - RNA, 27 nt, synthetic construct
  misc_feature 1..27: note = synthetic construct
  source 1..27: mol_type = other RNA
attatatgctctttacattataaggcc

SEQ ID NO: 735 - RNA, 27 nt, synthetic construct
  misc_feature 1..27: note = synthetic construct
  source 1..27: mol_type = other RNA
ttacattatatgctctttacattataa

SEQ ID NO: 736 - RNA, 27 nt, synthetic construct
  misc_feature 1..27: note = synthetic construct
  source 1..27: mol_type = other RNA
ttttaatccaggtctgtctcactctaa

SEQ ID NO: 737 - RNA, 27 nt, synthetic construct
  misc_feature 1..27: note = synthetic construct
  source 1..27: mol_type = other RNA
atgcagctaattaaatggcagatttta

SEQ ID NO: 738 - RNA, 27 nt, synthetic construct
  misc_feature 1..27: note = synthetic construct
  source 1..27: mol_type = other RNA
tatgcagctaattaaatggcagatttt

SEQ ID NO: 739 - RNA, 27 nt, synthetic construct
  misc_feature 1..27: note = synthetic construct
  source 1..27: mol_type = other RNA
atatgcagctaattaaatggcagattt

SEQ ID NO: 740 - RNA, 27 nt, synthetic construct
  misc_feature 1..27: note = synthetic construct
  source 1..27: mol_type = other RNA
gatatgcagctaattaaatggcagatt

SEQ ID NO: 741 - RNA, 27 nt, synthetic construct
  misc_feature 1..27: note = synthetic construct
  source 1..27: mol_type = other RNA
tgatatgcagctaattaaatggcagat

SEQ ID NO: 742 - RNA, 27 nt, synthetic construct
  misc_feature 1..27: note = synthetic construct
  source 1..27: mol_type = other RNA
gtgatatgcagctaattaaatggcaga

SEQ ID NO: 743 - RNA, 27 nt, synthetic construct
  misc_feature 1..27: note = synthetic construct
  source 1..27: mol_type = other RNA
ggtgatatgcagctaattaaatggcag

SEQ ID NO: 744 - RNA, 27 nt, synthetic construct
  misc_feature 1..27: note = synthetic construct
  source 1..27: mol_type = other RNA
ttgaggcagattgcgttaagtgctgta

SEQ ID NO: 745 - RNA, 27 nt, synthetic construct
  misc_feature 1..27: note = synthetic construct
  source 1..27: mol_type = other RNA
atttgacagatgaagaaattgaggcag

SEQ ID NO: 746 - RNA, 27 nt, synthetic construct
  misc_feature 1..27: note = synthetic construct
  source 1..27: mol_type = other RNA
catttgacagatgaagaaattgaggca

SEQ ID NO: 747 - RNA, 27 nt, synthetic construct
  misc_feature 1..27: note = synthetic construct
  source 1..27: mol_type = other RNA
ccatttgacagatgaagaaattgaggc

SEQ ID NO: 748 - RNA, 27 nt, synthetic construct
  misc_feature 1..27: note = synthetic construct
  source 1..27: mol_type = other RNA
tccatttgacagatgaagaaattgagg

SEQ ID NO: 749 - RNA, 27 nt, synthetic construct
  misc_feature 1..27: note = synthetic construct
  source 1..27: mol_type = other RNA
ttccatttgacagatgaagaaattgag

SEQ ID NO: 750 - RNA, 27 nt, synthetic construct
  misc_feature 1..27: note = synthetic construct
  source 1..27: mol_type = other RNA
gttccatttgacagatgaagaaattga

SEQ ID NO: 751 - RNA, 27 nt, synthetic construct
  misc_feature 1..27: note = synthetic construct
  source 1..27: mol_type = other RNA
ggttccatttgacagatgaagaaattg

SEQ ID NO: 752 - RNA, 27 nt, synthetic construct
  misc_feature 1..27: note = synthetic construct
  source 1..27: mol_type = other RNA
tggttccatttgacagatgaagaaatt

SEQ ID NO: 753 - RNA, 27 nt, synthetic construct
  misc_feature 1..27: note = synthetic construct
  source 1..27: mol_type = other RNA
ttggttccatttgacagatgaagaaat

SEQ ID NO: 754 - RNA, 27 nt, synthetic construct
  misc_feature 1..27: note = synthetic construct
  source 1..27: mol_type = other RNA
attggttccatttgacagatgaagaaa

SEQ ID NO: 755 - RNA, 27 nt, synthetic construct
  misc_feature 1..27: note = synthetic construct
  source 1..27: mol_type = other RNA
agcagaattggttccatttgacagatg

SEQ ID NO: 756 - RNA, 27 nt, synthetic construct
  misc_feature 1..27: note = synthetic construct
  source 1..27: mol_type = other RNA
aagcagaattggttccatttgacagat

SEQ ID NO: 757 - RNA, 27 nt, synthetic construct
  misc_feature 1..27: note = synthetic construct
  source 1..27: mol_type = other RNA
ccaagcagaattggttccatttgacag

SEQ ID NO: 758 - RNA, 27 nt, synthetic construct
  misc_feature 1..27: note = synthetic construct
  source 1..27: mol_type = other RNA
tgtagccaagcagaattggttccattt

SEQ ID NO: 759 - RNA, 27 nt, synthetic construct
  misc_feature 1..27: note = synthetic construct
  source 1..27: mol_type = other RNA
ctgtagccaagcagaattggttccatt

SEQ ID NO: 760 - RNA, 27 nt, synthetic construct
  misc_feature 1..27: note = synthetic construct
  source 1..27: mol_type = other RNA
taattctgtagccaagcagaattggtt

SEQ ID NO: 761 - RNA, 27 nt, synthetic construct
  misc_feature 1..27: note = synthetic construct
  source 1..27: mol_type = other RNA
tcacaataattctgtagccaagcagaa

SEQ ID NO: 762 - RNA, 27 nt, synthetic construct
  misc_feature 1..27: note = synthetic construct
  source 1..27: mol_type = other RNA
ttatcctcacaataattctgtagccaa

SEQ ID NO: 763 - RNA, 27 nt, synthetic construct
  misc_feature 1..27: note = synthetic construct
  source 1..27: mol_type = other RNA
tttatcctcacaataattctgtagcca

SEQ ID NO: 764 - RNA, 27 nt, synthetic construct
  misc_feature 1..27: note = synthetic construct
  source 1..27: mol_type = other RNA
ttttatcctcacaataattctgtagcc

SEQ ID NO: 765 - RNA, 27 nt, synthetic construct
  misc_feature 1..27: note = synthetic construct
  source 1..27: mol_type = other RNA
attttatcctcacaataattctgtagc

SEQ ID NO: 766 - RNA, 27 nt, synthetic construct
  misc_feature 1..27: note = synthetic construct
  source 1..27: mol_type = other RNA
gattttatcctcacaataattctgtag

SEQ ID NO: 767 - RNA, 27 nt, synthetic construct
  misc_feature 1..27: note = synthetic construct
  source 1..27: mol_type = other RNA
tgattttatcctcacaataattctgta

SEQ ID NO: 768 - RNA, 27 nt, synthetic construct
  misc_feature 1..27: note = synthetic construct
  source 1..27: mol_type = other RNA
atgattttatcctcacaataattctgt

SEQ ID NO: 769 - RNA, 27 nt, synthetic construct
  misc_feature 1..27: note = synthetic construct
  source 1..27: mol_type = other RNA
tatgattttatcctcacaataattctg

SEQ ID NO: 770 - RNA, 27 nt, synthetic construct
  misc_feature 1..27: note = synthetic construct
  source 1..27: mol_type = other RNA
atatgattttatcctcacaataattct

SEQ ID NO: 771 - RNA, 27 nt, synthetic construct
  misc_feature 1..27: note = synthetic construct
  source 1..27: mol_type = other RNA
tatatgattttatcctcacaataattc

SEQ ID NO: 772 - DNA, 19 bp, synthetic construct
  misc_feature 1..19: note = synthetic construct
  source 1..19: mol_type = other DNA
tgccttcatgggctcaatg

SEQ ID NO: 773 - DNA, 18 bp, synthetic construct
  misc_feature 1..18: note = synthetic construct
  source 1..18: mol_type = other DNA
tcggccaccaggaagtca

SEQ ID NO: 774 - RNA, 36 nt, synthetic construct
  misc_feature 1..36: note = synthetic construct
  modified_base 1: mod_base = OTHER; note = 2'-O-methyl modified with phosphodiester linkage to following ribonucleotide
  modified_base 2: mod_base = OTHER; note = 2'-O-methyl modified
  modified_base 3: mod_base = OTHER; note = 2'-O-methyl modified
  modified_base 4: mod_base = OTHER; note = 2'-O-methyl modified
  modified_base 5: mod_base = OTHER; note = 2'-O-methyl modified
  modified_base 6: mod_base = OTHER; note = 2'-O-methyl modified
  modified_base 7: mod_base = OTHER; note = 2'-O-methyl modified
  modified_base 8: mod_base = OTHER; note = 2'-fluoro modified
  modified_base 9: mod_base = OTHER; note = 2'-fluoro modified
  modified_base 10: mod_base = OTHER; note = 2'-fluoro modified
  modified_base 11: mod_base = OTHER; note = 2'-fluoro modified
  modified_base 12: mod_base = OTHER; note = 2'-O-methyl modified
  modified_base 13: mod_base = OTHER; note = 2'-O-methyl modified
  modified_base 14: mod_base = OTHER; note = 2'-O-methyl modified
  modified_base 15: mod_base = OTHER; note = 2'-O-methyl modified
  modified_base 16: mod_base = OTHER; note = 2'-O-methyl modified
  modified_base 17: mod_base = OTHER; note = 2'-O-methyl modified
  modified_base 18: mod_base = OTHER; note = 2'-O-methyl modified
  modified_base 19: mod_base = OTHER; note = 2'-O-methyl modified
  modified_base 20: mod_base = OTHER; note = 2'-O-methyl modified
  modified_base 21: mod_base = OTHER; note = 2'-O-methyl modified
  modified_base 22: mod_base = OTHER; note = 2'-O-methyl modified
  modified_base 23: mod_base = OTHER; note = 2'-O-methyl modified
  modified_base 24: mod_base = OTHER; note = 2'-O-methyl modified
  modified_base 25: mod_base = OTHER; note = 2'-O-methyl modified
  modified_base 26: mod_base = OTHER; note = 2'-O-methyl modified
  modified_base 27: mod_base = OTHER; note = 2'-O-methyl modified
  modified_base 28: mod_base = OTHER; note = GalNAc attached
  modified_base 29: mod_base = OTHER; note = GalNAc attached
  modified_base 30: mod_base = OTHER; note = GalNAc attached
  modified_base 31: mod_base = OTHER; note = 2'-O-methyl modified
  modified_base 32: mod_base = OTHER; note = 2'-O-methyl modified
  modified_base 33: mod_base = OTHER; note = 2'-O-methyl modified
  modified_base 34: mod_base = OTHER; note = 2'-O-methyl modified
  modified_base 35: mod_base = OTHER; note = 2'-O-methyl modified
  modified_base 36: mod_base = OTHER; note = 2'-O-methyl modified
  source 1..36: mol_type = other RNA
ctcatggaagagaagcagaagcagccgaaaggctgc

SEQ ID NO: 775 - RNA, 36 nt, synthetic construct
  misc_feature 1..36: note = synthetic construct
  modified_base 1: mod_base = OTHER; note = 2'-O-methyl modified with phosphodiester linkage to following ribonucleotide
  modified_base 2: mod_base = OTHER; note = 2'-O-methyl modified
  modified_base 3: mod_base = OTHER; note = 2'-O-methyl modified
  modified_base 4: mod_base = OTHER; note = 2'-O-methyl modified
  modified_base 5: mod_base = OTHER; note = 2'-O-methyl modified
  modified_base 6: mod_base = OTHER; note = 2'-O-methyl modified
  modified_base 7: mod_base = OTHER; note = 2'-O-methyl modified
  modified_base 8: mod_base = OTHER; note = 2'-fluoro modified
  modified_base 9: mod_base = OTHER; note = 2'-fluoro modified
  modified_base 10: mod_base = OTHER; note = 2'-fluoro modified
  modified_base 11: mod_base = OTHER; note = 2'-fluoro modified
  modified_base 12: mod_base = OTHER; note = 2'-O-methyl modified
  modified_base 13: mod_base = OTHER; note = 2'-O-methyl modified
  modified_base 14: mod_base = OTHER; note = 2'-O-methyl modified
  modified_base 15: mod_base = OTHER; note = 2'-O-methyl modified
  modified_base 16: mod_base = OTHER; note = 2'-O-methyl modified
  modified_base 17: mod_base = OTHER; note = 2'-O-methyl modified
  modified_base 18: mod_base = OTHER; note = 2'-O-methyl modified
  modified_base 19: mod_base = OTHER; note = 2'-O-methyl modified
  modified_base 20: mod_base = OTHER; note = 2'-O-methyl modified
  modified_base 21: mod_base = OTHER; note = 2'-O-methyl modified
  modified_base 22: mod_base = OTHER; note = 2'-O-methyl modified
  modified_base 23: mod_base = OTHER; note = 2'-O-methyl modified
  modified_base 24: mod_base = OTHER; note = 2'-O-methyl modified
  modified_base 25: mod_base = OTHER; note = 2'-O-methyl modified
  modified_base 26: mod_base = OTHER; note = 2'-O-methyl modified
  modified_base 27: mod_base = OTHER; note = 2'-O-methyl modified
  modified_base 28: mod_base = OTHER; note = GalNAc attached
  modified_base 29: mod_base = OTHER; note = GalNAc attached
  modified_base 30: mod_base = OTHER; note = GalNAc attached
  modified_base 31: mod_base = OTHER; note = 2'-O-methyl modified
  modified_base 32: mod_base = OTHER; note = 2'-O-methyl modified
  modified_base 33: mod_base = OTHER; note = 2'-O-methyl modified
  modified_base 34: mod_base = OTHER; note = 2'-O-methyl modified
  modified_base 35: mod_base = OTHER; note = 2'-O-methyl modified
  modified_base 36: mod_base = OTHER; note = 2'-O-methyl modified
  source 1..36: mol_type = other RNA
gaagagaagcagatcctgtagcagccgaaaggctgc

SEQ ID NO: 776 - RNA, 36 nt, synthetic construct
  misc_feature 1..36: note = synthetic construct
  modified_base 1: mod_base = OTHER; note = 2'-O-methyl modified with phosphodiester linkage to following ribonucleotide
  modified_base 2: mod_base = OTHER; note = 2'-O-methyl modified
  modified_base 3: mod_base = OTHER; note = 2'-O-methyl modified
  modified_base 4: mod_base = OTHER; note = 2'-O-methyl modified
  modified_base 5: mod_base = OTHER; note = 2'-O-methyl modified
  modified_base 6: mod_base = OTHER; note = 2'-O-methyl modified
  modified_base 7: mod_base = OTHER; note = 2'-O-methyl modified
  modified_base 8: mod_base = OTHER; note = 2'-fluoro modified
  modified_base 9: mod_base = OTHER; note = 2'-fluoro modified
  modified_base 10: mod_base = OTHER; note = 2'-fluoro modified
  modified_base 11: mod_base = OTHER; note = 2'-fluoro modified
  modified_base 12: mod_base = OTHER; note = 2'-O-methyl modified
  modified_base 13: mod_base = OTHER; note = 2'-O-methyl modified
  modified_base 14: mod_base = OTHER; note = 2'-O-methyl modified
  modified_base 15: mod_base = OTHER; note = 2'-O-methyl modified
  modified_base 16: mod_base = OTHER; note = 2'-O-methyl modified
  modified_base 17: mod_base = OTHER; note = 2'-O-methyl modified
  modified_base 18: mod_base = OTHER; note = 2'-O-methyl modified
  modified_base 19: mod_base = OTHER; note = 2'-O-methyl modified
  modified_base 20: mod_base = OTHER; note = 2'-O-methyl modified
  modified_base 21: mod_base = OTHER; note = 2'-O-methyl modified
  modified_base 22: mod_base = OTHER; note = 2'-O-methyl modified
  modified_base 23: mod_base = OTHER; note = 2'-O-methyl modified
  modified_base 24: mod_base = OTHER; note = 2'-O-methyl modified
  modified_base 25: mod_base = OTHER; note = 2'-O-methyl modified
  modified_base 26: mod_base = OTHER; note = 2'-O-methyl modified
  modified_base 27: mod_base = OTHER; note = 2'-O-methyl modified
  modified_base 28: mod_base = OTHER; note = GalNAc attached
  modified_base 29: mod_base = OTHER; note = GalNAc attached
  modified_base 30: mod_base = OTHER; note = GalNAc attached
  modified_base 31: mod_base = OTHER; note = 2'-O-methyl modified
  modified_base 32: mod_base = OTHER; note = 2'-O-methyl modified
  modified_base 33: mod_base = OTHER; note = 2'-O-methyl modified
  modified_base 34: mod_base = OTHER; note = 2'-O-methyl modified
  modified_base 35: mod_base = OTHER; note = 2'-O-methyl modified
  modified_base 36: mod_base = OTHER; note = 2'-O-methyl modified
  source 1..36: mol_type = other RNA
gcaaccgtaccattgtgctagcagccgaaaggctgc

SEQ ID NO: 777 - RNA, 36 nt, synthetic construct
  misc_feature 1..36: note = synthetic construct
  modified_base 1: mod_base = OTHER; note = 2'-O-methyl modified with phosphodiester linkage to following ribonucleotide
  modified_base 2: mod_base = OTHER; note = 2'-O-methyl modified
  modified_base 3: mod_base = OTHER; note = 2'-O-methyl modified
  modified_base 4: mod_base = OTHER; note = 2'-O-methyl modified
  modified_base 5: mod_base = OTHER; note = 2'-O-methyl modified
  modified_base 6: mod_base = OTHER; note = 2'-O-methyl modified
  modified_base 7: mod_base = OTHER; note = 2'-O-methyl modified
  modified_base 8: mod_base = OTHER; note = 2'-fluoro modified
  modified_base 9: mod_base = OTHER; note = 2'-fluoro modified
  modified_base 10: mod_base = OTHER; note = 2'-fluoro modified
  modified_base 11: mod_base = OTHER; note = 2'-fluoro modified
  modified_base 12: mod_base = OTHER; note = 2'-O-methyl modified
  modified_base 13: mod_base = OTHER; note = 2'-O-methyl modified
  modified_base 14: mod_base = OTHER; note = 2'-O-methyl modified
  modified_base 15: mod_base = OTHER; note = 2'-O-methyl modified
  modified_base 16: mod_base = OTHER; note = 2'-O-methyl modified
  modified_base 17: mod_base = OTHER; note = 2'-O-methyl modified
  modified_base 18: mod_base = OTHER; note = 2'-O-methyl modified
  modified_base 19: mod_base = OTHER; note = 2'-O-methyl modified
  modified_base 20: mod_base = OTHER; note = 2'-O-methyl modified
  modified_base 21: mod_base = OTHER; note = 2'-O-methyl modified
  modified_base 22: mod_base = OTHER; note = 2'-O-methyl modified
  modified_base 23: mod_base = OTHER; note = 2'-O-methyl modified
  modified_base 24: mod_base = OTHER; note = 2'-O-methyl modified
  modified_base 25: mod_base = OTHER; note = 2'-O-methyl modified
  modified_base 26: mod_base = OTHER; note = 2'-O-methyl modified
  modified_base 27: mod_base = OTHER; note = 2'-O-methyl modified
  modified_base 28: mod_base = OTHER; note = GalNAc attached
  modified_base 29: mod_base = OTHER; note = GalNAc attached
  modified_base 30: mod_base = OTHER; note = GalNAc attached
  modified_base 31: mod_base = OTHER; note = 2'-O-methyl modified
  modified_base 32: mod_base = OTHER; note = 2'-O-methyl modified
  modified_base 33: mod_base = OTHER; note = 2'-O-methyl modified
  modified_base 34: mod_base = OTHER; note = 2'-O-methyl modified
  modified_base 35: mod_base = OTHER; note = 2'-O-methyl modified
  modified_base 36: mod_base = OTHER; note = 2'-O-methyl modified
  source 1..36: mol_type = other RNA
cctgccagatgtgtctgctagcagccgaaaggctgc

SEQ ID NO: 778 - RNA, 36 nt, synthetic construct
  misc_feature 1..36: note = synthetic construct
  modified_base 1: mod_base = OTHER; note = 2'-O-methyl modified with phosphodiester linkage to following ribonucleotide
  modified_base 2: mod_base = OTHER; note = 2'-O-methyl modified
  modified_base 3: mod_base = OTHER; note = 2'-O-methyl modified
  modified_base 4: mod_base = OTHER; note = 2'-O-methyl modified
  modified_base 5: mod_base = OTHER; note = 2'-O-methyl modified
  modified_base 6: mod_base = OTHER; note = 2'-O-methyl modified
  modified_base 7: mod_base = OTHER; note = 2'-O-methyl modified
  modified_base 8: mod_base = OTHER; note = 2'-fluoro modified
  modified_base 9: mod_base = OTHER; note = 2'-fluoro modified
  modified_base 10: mod_base = OTHER; note = 2'-fluoro modified
  modified_base 11: mod_base = OTHER; note = 2'-fluoro modified
  modified_base 12: mod_base = OTHER; note = 2'-O-methyl modified
  modified_base 13: mod_base = OTHER; note = 2'-O-methyl modified
  modified_base 14: mod_base = OTHER; note = 2'-O-methyl modified
  modified_base 15: mod_base = OTHER; note = 2'-O-methyl modified
  modified_base 16: mod_base = OTHER; note = 2'-O-methyl modified
  modified_base 17: mod_base = OTHER; note = 2'-O-methyl modified
  modified_base 18: mod_base = OTHER; note = 2'-O-methyl modified
  modified_base 19: mod_base = OTHER; note = 2'-O-methyl modified
  modified_base 20: mod_base = OTHER; note = 2'-O-methyl modified
  modified_base 21: mod_base = OTHER; note = 2'-O-methyl modified
  modified_base 22: mod_base = OTHER; note = 2'-O-methyl modified
  modified_base 23: mod_base = OTHER; note = 2'-O-methyl modified
  modified_base 24: mod_base = OTHER; note = 2'-O-methyl modified
  modified_base 25: mod_base = OTHER; note = 2'-O-methyl modified
  modified_base 26: mod_base = OTHER; note = 2'-O-methyl modified
  modified_base 27: mod_base = OTHER; note = 2'-O-methyl modified
  modified_base 28: mod_base = OTHER; note = GalNAc attached
  modified_base 29: mod_base = OTHER; note = GalNAc attached
  modified_base 30: mod_base = OTHER; note = GalNAc attached
  modified_base 31: mod_base = OTHER; note = 2'-O-methyl modified
  modified_base 32: mod_base = OTHER; note = 2'-O-methyl modified
  modified_base 33: mod_base = OTHER; note = 2'-O-methyl modified
  modified_base 34: mod_base = OTHER; note = 2'-O-methyl modified
  modified_base 35: mod_base = OTHER; note = 2'-O-methyl modified
  modified_base 36: mod_base = OTHER; note = 2'-O-methyl modified
  source 1..36: mol_type = other RNA
ctgccagatgtgtctgctaagcagccgaaaggctgc

SEQ ID NO: 779 - RNA, 36 nt, synthetic construct
  misc_feature 1..36: note = synthetic construct
  modified_base 1: mod_base = OTHER; note = 2'-O-methyl modified with phosphodiester linkage to following ribonucleotide
  modified_base 2: mod_base = OTHER; note = 2'-O-methyl modified
  modified_base 3: mod_base = OTHER; note = 2'-O-methyl modified
  modified_base 4: mod_base = OTHER; note = 2'-O-methyl modified
  modified_base 5: mod_base = OTHER; note = 2'-O-methyl modified
  modified_base 6: mod_base = OTHER; note = 2'-O-methyl modified
  modified_base 7: mod_base = OTHER; note = 2'-O-methyl modified
  modified_base 8: mod_base = OTHER; note = 2'-fluoro modified
  modified_base 9: mod_base = OTHER; note = 2'-fluoro modified
  modified_base 10: mod_base = OTHER; note = 2'-fluoro modified
  modified_base 11: mod_base = OTHER; note = 2'-fluoro modified
  modified_base 12: mod_base = OTHER; note = 2'-O-methyl modified
  modified_base 13: mod_base = OTHER; note = 2'-O-methyl modified
  modified_base 14: mod_base = OTHER; note = 2'-O-methyl modified
  modified_base 15: mod_base = OTHER; note = 2'-O-methyl modified
  modified_base 16: mod_base = OTHER; note = 2'-O-methyl modified
  modified_base 17: mod_base = OTHER; note = 2'-O-methyl modified
  modified_base 18: mod_base = OTHER; note = 2'-O-methyl modified
  modified_base 19: mod_base = OTHER; note = 2'-O-methyl modified
  modified_base 20: mod_base = OTHER; note = 2'-O-methyl modified
  modified_base 21: mod_base = OTHER; note = 2'-O-methyl modified
  modified_base 22: mod_base = OTHER; note = 2'-O-methyl modified
  modified_base 23: mod_base = OTHER; note = 2'-O-methyl modified
  modified_base 24: mod_base = OTHER; note = 2'-O-methyl modified
  modified_base 25: mod_base = OTHER; note = 2'-O-methyl modified
  modified_base 26: mod_base = OTHER; note = 2'-O-methyl modified
  modified_base 27: mod_base = OTHER; note = 2'-O-methyl modified
  modified_base 28: mod_base = OTHER; note = GalNAc attached
  modified_base 29: mod_base = OTHER; note = GalNAc attached
  modified_base 30: mod_base = OTHER; note = GalNAc attached
  modified_base 31: mod_base = OTHER; note = 2'-O-methyl modified
  modified_base 32: mod_base = OTHER; note = 2'-O-methyl modified
  modified_base 33: mod_base = OTHER; note = 2'-O-methyl modified
  modified_base 34: mod_base = OTHER; note = 2'-O-methyl modified
  modified_base 35: mod_base = OTHER; note = 2'-O-methyl modified
  modified_base 36: mod_base = OTHER; note = 2'-O-methyl modified
  source 1..36: mol_type = other RNA
cagatgtgtctgctacagaagcagccgaaaggctgc

SEQ ID NO: 780 - RNA, 36 nt, synthetic construct
  misc_feature 1..36: note = synthetic construct
  modified_base 1: mod_base = OTHER; note = 2'-O-methyl modified with phosphodiester linkage to following ribonucleotide
  modified_base 2: mod_base = OTHER; note = 2'-O-methyl modified
  modified_base 3: mod_base = OTHER; note = 2'-O-methyl modified
  modified_base 4: mod_base = OTHER; note = 2'-O-methyl modified
  modified_base 5: mod_base = OTHER; note = 2'-O-methyl modified
  modified_base 6: mod_base = OTHER; note = 2'-O-methyl modified
  modified_base 7: mod_base = OTHER; note = 2'-O-methyl modified
  modified_base 8: mod_base = OTHER; note = 2'-fluoro modified
  modified_base 9: mod_base = OTHER; note = 2'-fluoro modified
  modified_base 10: mod_base = OTHER; note = 2'-fluoro modified
  modified_base 11: mod_base = OTHER; note = 2'-fluoro modified
  modified_base 12: mod_base = OTHER; note = 2'-O-methyl modified
  modified_base 13: mod_base = OTHER; note = 2'-O-methyl modified
  modified_base 14: mod_base = OTHER; note = 2'-O-methyl modified
  modified_base 15: mod_base = OTHER; note = 2'-O-methyl modified
  modified_base 16: mod_base = OTHER; note = 2'-O-methyl modified
  modified_base 17: mod_base = OTHER; note = 2'-O-methyl modified
  modified_base 18: mod_base = OTHER; note = 2'-O-methyl modified
  modified_base 19: mod_base = OTHER; note = 2'-O-methyl modified
  modified_base 20: mod_base = OTHER; note = 2'-O-methyl modified
  modified_base 21: mod_base = OTHER; note = 2'-O-methyl modified
  modified_base 22: mod_base = OTHER; note = 2'-O-methyl modified
  modified_base 23: mod_base = OTHER; note = 2'-O-methyl modified
  modified_base 24: mod_base = OTHER; note = 2'-O-methyl modified
  modified_base 25: mod_base = OTHER; note = 2'-O-methyl modified
  modified_base 26: mod_base = OTHER; note = 2'-O-methyl modified
  modified_base 27: mod_base = OTHER; note = 2'-O-methyl modified
  modified_base 28: mod_base = OTHER; note = GalNAc attached
  modified_base 29: mod_base = OTHER; note = GalNAc attached
  modified_base 30: mod_base = OTHER; note = GalNAc attached
  modified_base 31: mod_base = OTHER; note = 2'-O-methyl modified
  modified_base 32: mod_base = OTHER; note = 2'-O-methyl modified
  modified_base 33: mod_base = OTHER; note = 2'-O-methyl modified
  modified_base 34: mod_base = OTHER; note = 2'-O-methyl modified
  modified_base 35: mod_base = OTHER; note = 2'-O-methyl modified
  modified_base 36: mod_base = OTHER; note = 2'-O-methyl modified
  source 1..36: mol_type = other RNA
gactttgagaaggttgatcagcagccgaaaggctgc

SEQ ID NO: 781 - RNA, 36 nt, synthetic construct
  misc_feature 1..36: note = synthetic construct
  modified_base 1: mod_base = OTHER; note = 2'-O-methyl modified with phosphodiester linkage to following ribonucleotide
  modified_base 2: mod_base = OTHER; note = 2'-O-methyl modified
  modified_base 3: mod_base = OTHER; note = 2'-O-methyl modified
  modified_base 4: mod_base = OTHER; note = 2'-O-methyl modified
  modified_base 5: mod_base = OTHER; note = 2'-O-methyl modified
  modified_base 6: mod_base = OTHER; note = 2'-O-methyl modified
  modified_base 7: mod_base = OTHER; note = 2'-O-methyl modified
  modified_base 8: mod_base = OTHER; note = 2'-fluoro modified
  modified_base 9: mod_base = OTHER; note = 2'-fluoro modified
  modified_base 10: mod_base = OTHER; note = 2'-fluoro modified
  modified_base 11: mod_base = OTHER; note = 2'-fluoro modified
  modified_base 12: mod_base = OTHER; note = 2'-O-methyl modified
  modified_base 13: mod_base = OTHER; note = 2'-O-methyl modified
  modified_base 14: mod_base = OTHER; note = 2'-O-methyl modified
  modified_base 15: mod_base = OTHER; note = 2'-O-methyl modified
  modified_base 16: mod_base = OTHER; note = 2'-O-methyl modified
  modified_base 17: mod_base = OTHER; note = 2'-O-methyl modified
  modified_base 18: mod_base = OTHER; note = 2'-O-methyl modified
  modified_base 19: mod_base = OTHER; note = 2'-O-methyl modified
  modified_base 20: mod_base = OTHER; note = 2'-O-methyl modified
  modified_base 21: mod_base = OTHER; note = 2'-O-methyl modified
  modified_base 22: mod_base = OTHER; note = 2'-O-methyl modified
  modified_base 23: mod_base = OTHER; note = 2'-O-methyl modified
  modified_base 24: mod_base = OTHER; note = 2'-O-methyl modified
  modified_base 25: mod_base = OTHER; note = 2'-O-methyl modified
  modified_base 26: mod_base = OTHER; note = 2'-O-methyl modified
  modified_base 27: mod_base = OTHER; note = 2'-O-methyl modified
  modified_base 28: mod_base = OTHER; note = GalNAc attached
  modified_base 29: mod_base = OTHER; note = GalNAc attached
  modified_base 30: mod_base = OTHER; note = GalNAc attached
  modified_base 31: mod_base = OTHER; note = 2'-O-methyl modified
  modified_base 32: mod_base = OTHER; note = 2'-O-methyl modified
  modified_base 33: mod_base = OTHER; note = 2'-O-methyl modified
  modified_base 34: mod_base = OTHER; note = 2'-O-methyl modified
  modified_base 35: mod_base = OTHER; note = 2'-O-methyl modified
  modified_base 36: mod_base = OTHER; note = 2'-O-methyl modified
  source 1..36: mol_type = other RNA
actttgagaaggttgatctagcagccgaaaggctgc

SEQ ID NO: 782 - RNA, 36 nt, synthetic construct
  misc_feature 1..36: note = synthetic construct
  modified_base 1: mod_base = OTHER; note = 2'-O-methyl modified with phosphodiester linkage to following ribonucleotide
  modified_base 2: mod_base = OTHER; note = 2'-O-methyl modified
  modified_base 3: mod_base = OTHER; note = 2'-O-methyl modified
  modified_base 4: mod_base = OTHER; note = 2'-O-methyl modified
  modified_base 5: mod_base = OTHER; note = 2'-O-methyl modified
  modified_base 6: mod_base = OTHER; note = 2'-O-methyl modified
  modified_base 7: mod_base = OTHER; note = 2'-O-methyl modified
  modified_base 8: mod_base = OTHER; note = 2'-fluoro modified
  modified_base 9: mod_base = OTHER; note = 2'-fluoro modified
  modified_base 10: mod_base = OTHER; note = 2'-fluoro modified
  modified_base 11: mod_base = OTHER; note = 2'-fluoro modified
  modified_base 12: mod_base = OTHER; note = 2'-O-methyl modified
  modified_base 13: mod_base = OTHER; note = 2'-O-methyl modified
  modified_base 14: mod_base = OTHER; note = 2'-O-methyl modified
  modified_base 15: mod_base = OTHER; note = 2'-O-methyl modified
  modified_base 16: mod_base = OTHER; note = 2'-O-methyl modified
  modified_base 17: mod_base = OTHER; note = 2'-O-methyl modified
  modified_base 18: mod_base = OTHER; note = 2'-O-methyl modified
  modified_base 19: mod_base = OTHER; note = 2'-O-methyl modified
  modified_base 20: mod_base = OTHER; note = 2'-O-methyl modified
  modified_base 21: mod_base = OTHER; note = 2'-O-methyl modified
  modified_base 22: mod_base = OTHER; note = 2'-O-methyl modified
  modified_base 23: mod_base = OTHER; note = 2'-O-methyl modified
  modified_base 24: mod_base = OTHER; note = 2'-O-methyl modified
  modified_base 25: mod_base = OTHER; note = 2'-O-methyl modified
  modified_base 26: mod_base = OTHER; note = 2'-O-methyl modified
  modified_base 27: mod_base = OTHER; note = 2'-O-methyl modified
  modified_base 28: mod_base = OTHER; note = GalNAc attached
  modified_base 29: mod_base = OTHER; note = GalNAc attached
  modified_base 30: mod_base = OTHER; note = GalNAc attached
  modified_base 31: mod_base = OTHER; note = 2'-O-methyl modified
  modified_base 32: mod_base = OTHER; note = 2'-O-methyl modified
  modified_base 33: mod_base = OTHER; note = 2'-O-methyl modified
  modified_base 34: mod_base = OTHER; note = 2'-O-methyl modified
  modified_base 35: mod_base = OTHER; note = 2'-O-methyl modified
  modified_base 36: mod_base = OTHER; note = 2'-O-methyl modified
  source 1..36: mol_type = other RNA
tttgagaaggttgatctgaagcagccgaaaggctgc

SEQ ID NO: 783 - RNA, 36 nt, synthetic construct
  misc_feature 1..36: note = synthetic construct
  modified_base 1: mod_base = OTHER; note = 2'-O-methyl modified with phosphodiester linkage to following ribonucleotide
  modified_base 2: mod_base = OTHER; note = 2'-O-methyl modified
  modified_base 3: mod_base = OTHER; note = 2'-fluoro modified
  modified_base 4: mod_base = OTHER; note = 2'-O-methyl modified
  modified_base 5: mod_base = OTHER; note = 2'-O-methyl modified
  modified_base 6: mod_base = OTHER; note = 2'-O-methyl modified
  modified_base 7: mod_base = OTHER; note = 2'-O-methyl modified
  modified_base 8: mod_base = OTHER; note = 2'-fluoro modified
  modified_base 9: mod_base = OTHER; note = 2'-fluoro modified
  modified_base 10: mod_base = OTHER; note = 2'-fluoro modified
  modified_base 11: mod_base = OTHER; note = 2'-O-methyl modified
  modified_base 12: mod_base = OTHER; note = 2'-fluoro modified
  modified_base 13: mod_base = OTHER; note = 2'-fluoro modified
  modified_base 14: mod_base = OTHER; note = 2'-O-methyl modified
  modified_base 15: mod_base = OTHER; note = 2'-O-methyl modified
  modified_base 16: mod_base = OTHER; note = 2'-O-methyl modified
  modified_base 17: mod_base = OTHER; note = 2'-fluoro modified
  modified_base 18: mod_base = OTHER; note = 2'-O-methyl modified
  modified_base 19: mod_base = OTHER; note = 2'-O-methyl modified
  modified_base 20: mod_base = OTHER; note = 2'-O-methyl modified
  modified_base 21: mod_base = OTHER; note = 2'-O-methyl modified
  modified_base 22: mod_base = OTHER; note = 2'-O-methyl modified
  modified_base 23: mod_base = OTHER; note = 2'-O-methyl modified
  modified_base 24: mod_base = OTHER; note = 2'-O-methyl modified
  modified_base 25: mod_base = OTHER; note = 2'-O-methyl modified
  modified_base 26: mod_base = OTHER; note = 2'-O-methyl modified
  modified_base 27: mod_base = OTHER; note = 2'-O-methyl modified
  modified_base 28: mod_base = OTHER; note = GalNAc attached
  modified_base 29: mod_base = OTHER; note = GalNAc attached
  modified_base 30: mod_base = OTHER; note = GalNAc attached
  modified_base 31: mod_base = OTHER; note = 2'-O-methyl modified
  modified_base 32: mod_base = OTHER; note = 2'-O-methyl modified
  modified_base 33: mod_base = OTHER; note = 2'-O-methyl modified
  modified_base 34: mod_base = OTHER; note = 2'-O-methyl modified
  modified_base 35: mod_base = OTHER; note = 2'-O-methyl modified
  modified_base 36: mod_base = OTHER; note = 2'-O-methyl modified
  source 1..36: mol_type = other RNA
agctgtttggctacggagaagcagccgaaaggctgc

SEQ ID NO: 784 - RNA, 36 nt, synthetic construct
  misc_feature 1..36: note = synthetic construct
  modified_base 1: mod_base = OTHER; note = 2'-O-methyl modified with phosphodiester linkage to following ribonucleotide
  modified_base 2: mod_base = OTHER; note = 2'-O-methyl modified
  modified_base 3: mod_base = OTHER; note = 2'-O-methyl modified
  modified_base 4: mod_base = OTHER; note = 2'-O-methyl modified
  modified_base 5: mod_base = OTHER; note = 2'-O-methyl modified
  modified_base 6: mod_base = OTHER; note = 2'-O-methyl modified
  modified_base 7: mod_base = OTHER; note = 2'-O-methyl modified
  modified_base 8: mod_base = OTHER; note = 2'-fluoro modified
  modified_base 9: mod_base = OTHER; note = 2'-fluoro modified
  modified_base 10: mod_base = OTHER; note = 2'-fluoro modified
  modified_base 11: mod_base = OTHER; note = 2'-fluoro modified
  modified_base 12: mod_base = OTHER; note = 2'-O-methyl modified
  modified_base 13: mod_base = OTHER; note = 2'-O-methyl modified
  modified_base 14: mod_base = OTHER; note = 2'-O-methyl modified
  modified_base 15: mod_base = OTHER; note = 2'-O-methyl modified
  modified_base 16: mod_base = OTHER; note = 2'-O-methyl modified
  modified_base 17: mod_base = OTHER; note = 2'-O-methyl modified
  modified_base 18: mod_base = OTHER; note = 2'-O-methyl modified
  modified_base 19: mod_base = OTHER; note = 2'-O-methyl modified
  modified_base 20: mod_base = OTHER; note = 2'-O-methyl modified
  modified_base 21: mod_base = OTHER; note = 2'-O-methyl modified
  modified_base 22: mod_base = OTHER; note = 2'-O-methyl modified
  modified_base 23: mod_base = OTHER; note = 2'-O-methyl modified
  modified_base 24: mod_base = OTHER; note = 2'-O-methyl modified
  modified_base 25: mod_base = OTHER; note = 2'-O-methyl modified
  modified_base 26: mod_base = OTHER; note = 2'-O-methyl modified
  modified_base 27: mod_base = OTHER; note = 2'-O-methyl modified
  modified_base 28: mod_base = OTHER; note = GalNAc attached
  modified_base 29: mod_base = OTHER; note = GalNAc attached
  modified_base 30: mod_base = OTHER; note = GalNAc attached
  modified_base 31: mod_base = OTHER; note = 2'-O-methyl modified
  modified_base 32: mod_base = OTHER; note = 2'-O-methyl modified
  modified_base 33: mod_base = OTHER; note = 2'-O-methyl modified
  modified_base 34: mod_base = OTHER; note = 2'-O-methyl modified
  modified_base 35: mod_base = OTHER; note = 2'-O-methyl modified
  modified_base 36: mod_base = OTHER; note = 2'-O-methyl modified
  source 1..36: mol_type = other RNA
tggtgtttgtcagcaaagaagcagccgaaaggctgc

SEQ ID NO: 785 - RNA, 36 nt, synthetic construct
  misc_feature 1..36: note = synthetic construct
  modified_base 1: mod_base = OTHER; note = 2'-O-methyl modified with phosphodiester linkage to following ribonucleotide
  modified_base 2: mod_base = OTHER; note = 2'-O-methyl modified
  modified_base 3: mod_base = OTHER; note = 2'-O-methyl modified
  modified_base 4: mod_base = OTHER; note = 2'-O-methyl modified
  modified_base 5: mod_base = OTHER; note = 2'-O-methyl modified
  modified_base 6: mod_base = OTHER; note = 2'-O-methyl modified
  modified_base 7: mod_base = OTHER; note = 2'-O-methyl modified
  modified_base 8: mod_base = OTHER; note = 2'-fluoro modified
  modified_base 9: mod_base = OTHER; note = 2'-fluoro modified
  modified_base 10: mod_base = OTHER; note = 2'-fluoro modified
  modified_base 11: mod_base = OTHER; note = 2'-fluoro modified
  modified_base 12: mod_base = OTHER; note = 2'-O-methyl modified
  modified_base 13: mod_base = OTHER; note = 2'-O-methyl modified
  modified_base 14: mod_base = OTHER; note = 2'-O-methyl modified
  modified_base 15: mod_base = OTHER; note = 2'-O-methyl modified
  modified_base 16: mod_base = OTHER; note = 2'-O-methyl modified
  modified_base 17: mod_base = OTHER; note = 2'-O-methyl modified
  modified_base 18: mod_base = OTHER; note = 2'-O-methyl modified
  modified_base 19: mod_base = OTHER; note = 2'-O-methyl modified
  modified_base 20: mod_base = OTHER; note = 2'-O-methyl modified
  modified_base 21: mod_base = OTHER; note = 2'-O-methyl modified
  modified_base 22: mod_base = OTHER; note = 2'-O-methyl modified
  modified_base 23: mod_base = OTHER; note = 2'-O-methyl modified
  modified_base 24: mod_base = OTHER; note = 2'-O-methyl modified
  modified_base 25: mod_base = OTHER; note = 2'-O-methyl modified
  modified_base 26: mod_base = OTHER; note = 2'-O-methyl modified
  modified_base 27: mod_base = OTHER; note = 2'-O-methyl modified
  modified_base 28: mod_base = OTHER; note = GalNAc attached
  modified_base 29: mod_base = OTHER; note = GalNAc attached
  modified_base 30: mod_base = OTHER; note = GalNAc attached
  modified_base 31: mod_base = OTHER; note = 2'-O-methyl modified
  modified_base 32: mod_base = OTHER; note = 2'-O-methyl modified
  modified_base 33: mod_base = OTHER; note = 2'-O-methyl modified
  modified_base 34: mod_base = OTHER; note = 2'-O-methyl modified
  modified_base 35: mod_base = OTHER; note = 2'-O-methyl modified
  modified_base 36: mod_base = OTHER; note = 2'-O-methyl modified
  source 1..36: mol_type = other RNA
tgtttgtcagcaaagatgtagcagccgaaaggctgc

SEQ ID NO: 786 - RNA, 36 nt, synthetic construct
  misc_feature 1..36: note = synthetic construct
  modified_base 1: mod_base = OTHER; note = 2'-O-methyl modified with phosphodiester linkage to following ribonucleotide
  modified_base 2: mod_base = OTHER; note = 2'-O-methyl modified
  modified_base 3: mod_base = OTHER; note = 2'-O-methyl modified
  modified_base 4: mod_base = OTHER; note = 2'-O-methyl modified
  modified_base 5: mod_base = OTHER; note = 2'-O-methyl modified
  modified_base 6: mod_base = OTHER; note = 2'-O-methyl modified
  modified_base 7: mod_base = OTHER; note = 2'-O-methyl modified
  modified_base 8: mod_base = OTHER; note = 2'-fluoro modified
  modified_base 9: mod_base = OTHER; note = 2'-fluoro modified
  modified_base 10: mod_base = OTHER; note = 2'-fluoro modified
  modified_base 11: mod_base = OTHER; note = 2'-fluoro modified
  modified_base 12: mod_base = OTHER; note = 2'-O-methyl modified
  modified_base 13: mod_base = OTHER; note = 2'-O-methyl modified
  modified_base 14: mod_base = OTHER; note = 2'-O-methyl modified
  modified_base 15: mod_base = OTHER; note = 2'-O-methyl modified
  modified_base 16: mod_base = OTHER; note = 2'-O-methyl modified
  modified_base 17: mod_base = OTHER; note = 2'-O-methyl modified
  modified_base 18: mod_base = OTHER; note = 2'-O-methyl modified
  modified_base 19: mod_base = OTHER; note = 2'-O-methyl modified
  modified_base 20: mod_base = OTHER; note = 2'-O-methyl modified
  modified_base 21: mod_base = OTHER; note = 2'-O-methyl modified
  modified_base 22: mod_base = OTHER; note = 2'-O-methyl modified
  modified_base 23: mod_base = OTHER; note = 2'-O-methyl modified
  modified_base 24: mod_base = OTHER; note = 2'-O-methyl modified
  modified_base 25: mod_base = OTHER; note = 2'-O-methyl modified
  modified_base 26: mod_base = OTHER; note = 2'-O-methyl modified
  modified_base 27: mod_base = OTHER; note = 2'-O-methyl modified
  modified_base 28: mod_base = OTHER; note = GalNAc attached
  modified_base 29: mod_base = OTHER; note = GalNAc attached
  modified_base 30: mod_base = OTHER; note = GalNAc attached
  modified_base 31: mod_base = OTHER; note = 2'-O-methyl modified
  modified_base 32: mod_base = OTHER; note = 2'-O-methyl modified
  modified_base 33: mod_base = OTHER; note = 2'-O-methyl modified
  modified_base 34: mod_base = OTHER; note = 2'-O-methyl modified
  modified_base 35: mod_base = OTHER; note = 2'-O-methyl modified
  modified_base 36: mod_base = OTHER; note = 2'-O-methyl modified
  source 1..36: mol_type = other RNA
ggagacaccttcaatgcctagcagccgaaaggctgc

SEQ ID NO: 787 - RNA, 36 nt, synthetic construct
  misc_feature 1..36: note = synthetic construct
  modified_base 1: mod_base = OTHER; note = 2'-O-methyl modified with phosphodiester linkage to following ribonucleotide
  modified_base 2: mod_base = OTHER; note = 2'-O-methyl modified
  modified_base 3: mod_base = OTHER; note = 2'-O-methyl modified
  modified_base 4: mod_base = OTHER; note = 2'-O-methyl modified
  modified_base 5: mod_base = OTHER; note = 2'-O-methyl modified
  modified_base 6: mod_base = OTHER; note = 2'-O-methyl modified
  modified_base 7: mod_base = OTHER; note = 2'-O-methyl modified
  modified_base 8: mod_base = OTHER; note = 2'-fluoro modified
  modified_base 9: mod_base = OTHER; note = 2'-fluoro modified
  modified_base 10: mod_base = OTHER; note = 2'-fluoro modified
  modified_base 11: mod_base = OTHER; note = 2'-fluoro modified
  modified_base 12: mod_base = OTHER; note = 2'-O-methyl modified
  modified_base 13: mod_base = OTHER; note = 2'-O-methyl modified
  modified_base 14: mod_base = OTHER; note = 2'-O-methyl modified
  modified_base 15: mod_base = OTHER; note = 2'-O-methyl modified
  modified_base 16: mod_base = OTHER; note = 2'-O-methyl modified
  modified_base 17: mod_base = OTHER; note = 2'-O-methyl modified
  modified_base 18: mod_base = OTHER; note = 2'-O-methyl modified
  modified_base 19: mod_base = OTHER; note = 2'-O-methyl modified
  modified_base 20: mod_base = OTHER; note = 2'-O-methyl modified
  modified_base 21: mod_base = OTHER; note = 2'-O-methyl modified
  modified_base 22: mod_base = OTHER; note = 2'-O-methyl modified
  modified_base 23: mod_base = OTHER; note = 2'-O-methyl modified
  modified_base 24: mod_base = OTHER; note = 2'-O-methyl modified
  modified_base 25: mod_base = OTHER; note = 2'-O-methyl modified
  modified_base 26: mod_base = OTHER; note = 2'-O-methyl modified
  modified_base 27: mod_base = OTHER; note = 2'-O-methyl modified
  modified_base 28: mod_base = OTHER; note = GalNAc attached
  modified_base 29: mod_base = OTHER; note = GalNAc attached
  modified_base 30: mod_base = OTHER; note = GalNAc attached
  modified_base 31: mod_base = OTHER; note = 2'-O-methyl modified
  modified_base 32: mod_base = OTHER; note = 2'-O-methyl modified
  modified_base 33: mod_base = OTHER; note = 2'-O-methyl modified
  modified_base 34: mod_base = OTHER; note = 2'-O-methyl modified
  modified_base 35: mod_base = OTHER; note = 2'-O-methyl modified
  modified_base 36: mod_base = OTHER; note = 2'-O-methyl modified
  source 1..36: mol_type = other RNA
ccttcaatgcctccgtcatagcagccgaaaggctgc

SEQ ID NO: 788 - RNA, 36 nt, synthetic construct
  misc_feature 1..36: note = synthetic construct
  modified_base 1: mod_base = OTHER; note = 2'-O-methyl modified with phosphodiester linkage to following ribonucleotide
  modified_base 2: mod_base = OTHER; note = 2'-O-methyl modified
  modified_base 3: mod_base = OTHER; note = 2'-O-methyl modified
  modified_base 4: mod_base = OTHER; note = 2'-O-methyl modified
  modified_base 5: mod_base = OTHER; note = 2'-O-methyl modified
  modified_base 6: mod_base = OTHER; note = 2'-O-methyl modified
  modified_base 7: mod_base = OTHER; note = 2'-O-methyl modified
  modified_base 8: mod_base = OTHER; note = 2'-fluoro modified
  modified_base 9: mod_base = OTHER; note = 2'-fluoro modified
  modified_base 10: mod_base = OTHER; note = 2'-fluoro modified
  modified_base 11: mod_base = OTHER; note = 2'-fluoro modified
  modified_base 12: mod_base = OTHER; note = 2'-O-methyl modified
  modified_base 13: mod_base = OTHER; note = 2'-O-methyl modified
  modified_base 14: mod_base = OTHER; note = 2'-O-methyl modified
  modified_base 15: mod_base = OTHER; note = 2'-O-methyl modified
  modified_base 16: mod_base = OTHER; note = 2'-O-methyl modified
  modified_base 17: mod_base = OTHER; note = 2'-O-methyl modified
  modified_base 18: mod_base = OTHER; note = 2'-O-methyl modified
  modified_base 19: mod_base = OTHER; note = 2'-O-methyl modified
  modified_base 20: mod_base = OTHER; note = 2'-O-methyl modified
  modified_base 21: mod_base = OTHER; note = 2'-O-methyl modified
  modified_base 22: mod_base = OTHER; note = 2'-O-methyl modified
  modified_base 23: mod_base = OTHER; note = 2'-O-methyl modified
  modified_base 24: mod_base = OTHER; note = 2'-O-methyl modified
  modified_base 25: mod_base = OTHER; note = 2'-O-methyl modified
  modified_base 26: mod_base = OTHER; note = 2'-O-methyl modified
  modified_base 27: mod_base = OTHER; note = 2'-O-methyl modified
  modified_base 28: mod_base = OTHER; note = GalNAc attached
  modified_base 29: mod_base = OTHER; note = GalNAc attached
  modified_base 30: mod_base = OTHER; note = GalNAc attached
  modified_base 31: mod_base = OTHER; note = 2'-O-methyl modified
  modified_base 32: mod_base = OTHER; note = 2'-O-methyl modified
  modified_base 33: mod_base = OTHER; note = 2'-O-methyl modified
  modified_base 34: mod_base = OTHER; note = 2'-O-methyl modified
  modified_base 35: mod_base = OTHER; note = 2'-O-methyl modified
  modified_base 36: mod_base = OTHER; note = 2'-O-methyl modified
  source 1..36: mol_type = other RNA
ttcaatgcctccgtcatctagcagccgaaaggctgc

SEQ ID NO: 789 - RNA, 36 nt, synthetic construct
  misc_feature 1..36: note = synthetic construct
  modified_base 1: mod_base = OTHER; note = 2'-O-methyl modified with phosphodiester linkage to following ribonucleotide
  modified_base 2: mod_base = OTHER; note = 2'-O-methyl modified
  modified_base 3: mod_base = OTHER; note = 2'-O-methyl modified
  modified_base 4: mod_base = OTHER; note = 2'-O-methyl modified
  modified_base 5: mod_base = OTHER; note = 2'-O-methyl modified
  modified_base 6: mod_base = OTHER; note = 2'-O-methyl modified
  modified_base 7: mod_base = OTHER; note = 2'-O-methyl modified
  modified_base 8: mod_base = OTHER; note = 2'-fluoro modified
  modified_base 9: mod_base = OTHER; note = 2'-fluoro modified
  modified_base 10: mod_base = OTHER; note = 2'-fluoro modified
  modified_base 11: mod_base = OTHER; note = 2'-fluoro modified
  modified_base 12: mod_base = OTHER; note = 2'-O-methyl modified
  modified_base 13: mod_base = OTHER; note = 2'-O-methyl modified
  modified_base 14: mod_base = OTHER; note = 2'-O-methyl modified
  modified_base 15: mod_base = OTHER; note = 2'-O-methyl modified
  modified_base 16: mod_base = OTHER; note = 2'-O-methyl modified
  modified_base 17: mod_base = OTHER; note = 2'-O-methyl modified
  modified_base 18: mod_base = OTHER; note = 2'-O-methyl modified
  modified_base 19: mod_base = OTHER; note = 2'-O-methyl modified
  modified_base 20: mod_base = OTHER; note = 2'-O-methyl modified
  modified_base 21: mod_base = OTHER; note = 2'-O-methyl modified
  modified_base 22: mod_base = OTHER; note = 2'-O-methyl modified
  modified_base 23: mod_base = OTHER; note = 2'-O-methyl modified
  modified_base 24: mod_base = OTHER; note = 2'-O-methyl modified
  modified_base 25: mod_base = OTHER; note = 2'-O-methyl modified
  modified_base 26: mod_base = OTHER; note = 2'-O-methyl modified
  modified_base 27: mod_base = OTHER; note = 2'-O-methyl modified
  modified_base 28: mod_base = OTHER; note = GalNAc attached
  modified_base 29: mod_base = OTHER; note = GalNAc attached
  modified_base 30: mod_base = OTHER; note = GalNAc attached
  modified_base 31: mod_base = OTHER; note = 2'-O-methyl modified
  modified_base 32: mod_base = OTHER; note = 2'-O-methyl modified
  modified_base 33: mod_base = OTHER; note = 2'-O-methyl modified
  modified_base 34: mod_base = OTHER; note = 2'-O-methyl modified
  modified_base 35: mod_base = OTHER; note = 2'-O-methyl modified
  modified_base 36: mod_base = OTHER; note = 2'-O-methyl modified
  source 1..36: mol_type = other RNA
tggtcgtgtgaggaaagggagcagccgaaaggctgc

SEQ ID NO: 790 - RNA, 36 nt, synthetic construct
  misc_feature 1..36: note = synthetic construct
  modified_base 1: mod_base = OTHER; note = 2'-O-methyl modified with phosphodiester linkage to following ribonucleotide
  modified_base 2: mod_base = OTHER; note = 2'-O-methyl modified
  modified_base 3: mod_base = OTHER; note = 2'-O-methyl modified
  modified_base 4: mod_base = OTHER; note = 2'-O-methyl modified
  modified_base 5: mod_base = OTHER; note = 2'-O-methyl modified
  modified_base 6: mod_base = OTHER; note = 2'-O-methyl modified
  modified_base 7: mod_base = OTHER; note = 2'-O-methyl modified
  modified_base 8: mod_base = OTHER; note = 2'-fluoro modified
  modified_base 9: mod_base = OTHER; note = 2'-fluoro modified
  modified_base 10: mod_base = OTHER; note = 2'-fluoro modified
  modified_base 11: mod_base = OTHER; note = 2'-fluoro modified
  modified_base 12: mod_base = OTHER; note = 2'-O-methyl modified
  modified_base 13: mod_base = OTHER; note = 2'-O-methyl modified
  modified_base 14: mod_base = OTHER; note = 2'-O-methyl modified
  modified_base 15: mod_base = OTHER; note = 2'-O-methyl modified
  modified_base 16: mod_base = OTHER; note = 2'-O-methyl modified
  modified_base 17: mod_base = OTHER; note = 2'-O-methyl modified
  modified_base 18: mod_base = OTHER; note = 2'-O-methyl modified
  modified_base 19: mod_base = OTHER; note = 2'-O-methyl modified
  modified_base 20: mod_base = OTHER; note = 2'-O-methyl modified
  modified_base 21: mod_base = OTHER; note = 2'-O-methyl modified
  modified_base 22: mod_base = OTHER; note = 2'-O-methyl modified
  modified_base 23: mod_base = OTHER; note = 2'-O-methyl modified
  modified_base 24: mod_base = OTHER; note = 2'-O-methyl modified
  modified_base 25: mod_base = OTHER; note = 2'-O-methyl modified
  modified_base 26: mod_base = OTHER; note = 2'-O-methyl modified
  modified_base 27: mod_base = OTHER; note = 2'-O-methyl modified
  modified_base 28: mod_base = OTHER; note = GalNAc attached
  modified_base 29: mod_base = OTHER; note = GalNAc attached
  modified_base 30: mod_base = OTHER; note = GalNAc attached
  modified_base 31: mod_base = OTHER; note = 2'-O-methyl modified
  modified_base 32: mod_base = OTHER; note = 2'-O-methyl modified
  modified_base 33: mod_base = OTHER; note = 2'-O-methyl modified
  modified_base 34: mod_base = OTHER; note = 2'-O-methyl modified
  modified_base 35: mod_base = OTHER; note = 2'-O-methyl modified
  modified_base 36: mod_base = OTHER; note = 2'-O-methyl modified
  source 1..36: mol_type = other RNA
cgtgtgaggaaaggggctgagcagccgaaaggctgc

SEQ ID NO: 791 - RNA, 36 nt, synthetic construct
  misc_feature 1..36: note = synthetic construct
  modified_base 1: mod_base = OTHER; note = 2'-O-methyl modified with phosphodiester linkage to following ribonucleotide
  modified_base 2: mod_base = OTHER; note = 2'-O-methyl modified
  modified_base 3: mod_base = OTHER; note = 2'-O-methyl modified
  modified_base 4: mod_base = OTHER; note = 2'-O-methyl modified
  modified_base 5: mod_base = OTHER; note = 2'-O-methyl modified
  modified_base 6: mod_base = OTHER; note = 2'-O-methyl modified
  modified_base 7: mod_base = OTHER; note = 2'-O-methyl modified
  modified_base 8: mod_base = OTHER; note = 2'-fluoro modified
  modified_base 9: mod_base = OTHER; note = 2'-fluoro modified
  modified_base 10: mod_base = OTHER; note = 2'-fluoro modified
  modified_base 11: mod_base = OTHER; note = 2'-fluoro modified
  modified_base 12: mod_base = OTHER; note = 2'-O-methyl modified
  modified_base 13: mod_base = OTHER; note = 2'-O-methyl modified
  modified_base 14: mod_base = OTHER; note = 2'-O-methyl modified
  modified_base 15: mod_base = OTHER; note = 2'-O-methyl modified
  modified_base 16: mod_base = OTHER; note = 2'-O-methyl modified
  modified_base 17: mod_base = OTHER; note = 2'-O-methyl modified
  modified_base 18: mod_base = OTHER; note = 2'-O-methyl modified
  modified_base 19: mod_base = OTHER; note = 2'-O-methyl modified
  modified_base 20: mod_base = OTHER; note = 2'-O-methyl modified
  modified_base 21: mod_base = OTHER; note = 2'-O-methyl modified
  modified_base 22: mod_base = OTHER; note = 2'-O-methyl modified
  modified_base 23: mod_base = OTHER; note = 2'-O-methyl modified
  modified_base 24: mod_base = OTHER; note = 2'-O-methyl modified
  modified_base 25: mod_base = OTHER; note = 2'-O-methyl modified
  modified_base 26: mod_base = OTHER; note = 2'-O-methyl modified
  modified_base 27: mod_base = OTHER; note = 2'-O-methyl modified
  modified_base 28: mod_base = OTHER; note = GalNAc attached
  modified_base 29: mod_base = OTHER; note = GalNAc attached
  modified_base 30: mod_base = OTHER; note = GalNAc attached
  modified_base 31: mod_base = OTHER; note = 2'-O-methyl modified
  modified_base 32: mod_base = OTHER; note = 2'-O-methyl modified
  modified_base 33: mod_base = OTHER; note = 2'-O-methyl modified
  modified_base 34: mod_base = OTHER; note = 2'-O-methyl modified
  modified_base 35: mod_base = OTHER; note = 2'-O-methyl modified
  modified_base 36: mod_base = OTHER; note = 2'-O-methyl modified
  source 1..36: mol_type = other RNA
tgtgaggaaaggggctgtgagcagccgaaaggctgc

SEQ ID NO: 792 - RNA, 36 nt, synthetic construct
  misc_feature 1..36: note = synthetic construct
  modified_base 1: mod_base = OTHER; note = 2'-O-methyl modified with phosphodiester linkage to following ribonucleotide
  modified_base 2: mod_base = OTHER; note = 2'-O-methyl modified
  modified_base 3: mod_base = OTHER; note = 2'-O-methyl modified
  modified_base 4: mod_base = OTHER; note = 2'-O-methyl modified
  modified_base 5: mod_base = OTHER; note = 2'-O-methyl modified
  modified_base 6: mod_base = OTHER; note = 2'-O-methyl modified
  modified_base 7: mod_base = OTHER; note = 2'-O-methyl modified
  modified_base 8: mod_base = OTHER; note = 2'-fluoro modified
  modified_base 9: mod_base = OTHER; note = 2'-fluoro modified
  modified_base 10: mod_base = OTHER; note = 2'-fluoro modified
  modified_base 11: mod_base = OTHER; note = 2'-fluoro modified
  modified_base 12: mod_base = OTHER; note = 2'-O-methyl modified
  modified_base 13: mod_base = OTHER; note = 2'-O-methyl modified
  modified_base 14: mod_base = OTHER; note = 2'-O-methyl modified
  modified_base 15: mod_base = OTHER; note = 2'-O-methyl modified
  modified_base 16: mod_base = OTHER; note = 2'-O-methyl modified
  modified_base 17: mod_base = OTHER; note = 2'-O-methyl modified
  modified_base 18: mod_base = OTHER; note = 2'-O-methyl modified
  modified_base 19: mod_base = OTHER; note = 2'-O-methyl modified
  modified_base 20: mod_base = OTHER; note = 2'-O-methyl modified
  modified_base 21: mod_base = OTHER; note = 2'-O-methyl modified
  modified_base 22: mod_base = OTHER; note = 2'-O-methyl modified
  modified_base 23: mod_base = OTHER; note = 2'-O-methyl modified
  modified_base 24: mod_base = OTHER; note = 2'-O-methyl modified
  modified_base 25: mod_base = OTHER; note = 2'-O-methyl modified
  modified_base 26: mod_base = OTHER; note = 2'-O-methyl modified
  modified_base 27: mod_base = OTHER; note = 2'-O-methyl modified
  modified_base 28: mod_base = OTHER; note = GalNAc attached
  modified_base 29: mod_base = OTHER; note = GalNAc attached
  modified_base 30: mod_base = OTHER; note = GalNAc attached
  modified_base 31: mod_base = OTHER; note = 2'-O-methyl modified
  modified_base 32: mod_base = OTHER; note = 2'-O-methyl modified
  modified_base 33: mod_base = OTHER; note = 2'-O-methyl modified
  modified_base 34: mod_base = OTHER; note = 2'-O-methyl modified
  modified_base 35: mod_base = OTHER; note = 2'-O-methyl modified
  modified_base 36: mod_base = OTHER; note = 2'-O-methyl modified
  source 1..36: mol_type = other RNA
gtgaggaaaggggctgtgcagcagccgaaaggctgc

SEQ ID NO: 793 - RNA, 36 nt, synthetic construct
  misc_feature 1..36: note = synthetic construct
  modified_base 1: mod_base = OTHER; note = 2'-O-methyl modified with phosphodiester linkage to following ribonucleotide
  modified_base 2: mod_base = OTHER; note = 2'-O-methyl modified
  modified_base 3: mod_base = OTHER; note = 2'-O-methyl modified
  modified_base 4: mod_base = OTHER; note = 2'-O-methyl modified
  modified_base 5: mod_base = OTHER; note = 2'-O-methyl modified
  modified_base 6: mod_base = OTHER; note = 2'-O-methyl modified
  modified_base 7: mod_base = OTHER; note = 2'-O-methyl modified
  modified_base 8: mod_base = OTHER; note = 2'-fluoro modified
  modified_base 9: mod_base = OTHER; note = 2'-fluoro modified
  modified_base 10: mod_base = OTHER; note = 2'-fluoro modified
  modified_base 11: mod_base = OTHER; note = 2'-fluoro modified
  modified_base 12: mod_base = OTHER; note = 2'-O-methyl modified
  modified_base 13: mod_base = OTHER; note = 2'-O-methyl modified
  modified_base 14: mod_base = OTHER; note = 2'-O-methyl modified
  modified_base 15: mod_base = OTHER; note = 2'-O-methyl modified
  modified_base 16: mod_base = OTHER; note = 2'-O-methyl modified
  modified_base 17: mod_base = OTHER; note = 2'-O-methyl modified
  modified_base 18: mod_base = OTHER; note = 2'-O-methyl modified
  modified_base 19: mod_base = OTHER; note = 2'-O-methyl modified
  modified_base 20: mod_base = OTHER; note = 2'-O-methyl modified
  modified_base 21: mod_base = OTHER; note = 2'-O-methyl modified
  modified_base 22: mod_base = OTHER; note = 2'-O-methyl modified
  modified_base 23: mod_base = OTHER; note = 2'-O-methyl modified
  modified_base 24: mod_base = OTHER; note = 2'-O-methyl modified
  modified_base 25: mod_base = OTHER; note = 2'-O-methyl modified
  modified_base 26: mod_base = OTHER; note = 2'-O-methyl modified
  modified_base 27: mod_base = OTHER; note = 2'-O-methyl modified
  modified_base 28: mod_base = OTHER; note = GalNAc attached
  modified_base 29: mod_base = OTHER; note = GalNAc attached
  modified_base 30: mod_base = OTHER; note = GalNAc attached
  modified_base 31: mod_base = OTHER; note = 2'-O-methyl modified
  modified_base 32: mod_base = OTHER; note = 2'-O-methyl modified
  modified_base 33: mod_base = OTHER; note = 2'-O-methyl modified
  modified_base 34: mod_base = OTHER; note = 2'-O-methyl modified
  modified_base 35: mod_base = OTHER; note = 2'-O-methyl modified
  modified_base 36: mod_base = OTHER; note = 2'-O-methyl modified
  source 1..36: mol_type = other RNA
agctggagacaccttcaatagcagccgaaaggctgc

SEQ ID NO: 794 - RNA, 36 nt, synthetic construct
  misc_feature 1..36: note = synthetic construct
  modified_base 1: mod_base = OTHER; note = 2'-O-methyl modified with phosphodiester linkage to following ribonucleotide
  modified_base 2: mod_base = OTHER; note = 2'-O-methyl modified
  modified_base 3: mod_base = OTHER; note = 2'-O-methyl modified
  modified_base 4: mod_base = OTHER; note = 2'-O-methyl modified
  modified_base 5: mod_base = OTHER; note = 2'-O-methyl modified
  modified_base 6: mod_base = OTHER; note = 2'-O-methyl modified
  modified_base 7: mod_base = OTHER; note = 2'-O-methyl modified
  modified_base 8: mod_base = OTHER; note = 2'-fluoro modified
  modified_base 9: mod_base = OTHER; note = 2'-fluoro modified
  modified_base 10: mod_base = OTHER; note = 2'-fluoro modified
  modified_base 11: mod_base = OTHER; note = 2'-fluoro modified
  modified_base 12: mod_base = OTHER; note = 2'-O-methyl modified
  modified_base 13: mod_base = OTHER; note = 2'-O-methyl modified
  modified_base 14: mod_base = OTHER; note = 2'-O-methyl modified
  modified_base 15: mod_base = OTHER; note = 2'-O-methyl modified
  modified_base 16: mod_base = OTHER; note = 2'-O-methyl modified
  modified_base 17: mod_base = OTHER; note = 2'-O-methyl modified
  modified_base 18: mod_base = OTHER; note = 2'-O-methyl modified
  modified_base 19: mod_base = OTHER; note = 2'-O-methyl modified
  modified_base 20: mod_base = OTHER; note = 2'-O-methyl modified
  modified_base 21: mod_base = OTHER; note = 2'-O-methyl modified
  modified_base 22: mod_base = OTHER; note = 2'-O-methyl modified
  modified_base 23: mod_base = OTHER; note = 2'-O-methyl modified
  modified_base 24: mod_base = OTHER; note = 2'-O-methyl modified
  modified_base 25: mod_base = OTHER; note = 2'-O-methyl modified
  modified_base 26: mod_base = OTHER; note = 2'-O-methyl modified
  modified_base 27: mod_base = OTHER; note = 2'-O-methyl modified
  modified_base 28: mod_base = OTHER; note = GalNAc attached
  modified_base 29: mod_base = OTHER; note = GalNAc attached
  modified_base 30: mod_base = OTHER; note = GalNAc attached
  modified_base 31: mod_base = OTHER; note = 2'-O-methyl modified
  modified_base 32: mod_base = OTHER; note = 2'-O-methyl modified
  modified_base 33: mod_base = OTHER; note = 2'-O-methyl modified
  modified_base 34: mod_base = OTHER; note = 2'-O-methyl modified
  modified_base 35: mod_base = OTHER; note = 2'-O-methyl modified
  modified_base 36: mod_base = OTHER; note = 2'-O-methyl modified
  source 1..36: mol_type = other RNA
atggtcgtgtgaggaaaggagcagccgaaaggctgc

SEQ ID NO: 795 - RNA, 36 nt, synthetic construct
  misc_feature 1..36: note = synthetic construct
  modified_base 1: mod_base = OTHER; note = 2'-O-methyl modified with phosphodiester linkage to following ribonucleotide
  modified_base 2: mod_base = OTHER; note = 2'-O-methyl modified
  modified_base 3: mod_base = OTHER; note = 2'-O-methyl modified
  modified_base 4: mod_base = OTHER; note = 2'-O-methyl modified
  modified_base 5: mod_base = OTHER; note = 2'-O-methyl modified
  modified_base 6: mod_base = OTHER; note = 2'-O-methyl modified
  modified_base 7: mod_base = OTHER; note = 2'-O-methyl modified
  modified_base 8: mod_base = OTHER; note = 2'-fluoro modified
  modified_base 9: mod_base = OTHER; note = 2'-fluoro modified
  modified_base 10: mod_base = OTHER; note = 2'-fluoro modified
  modified_base 11: mod_base = OTHER; note = 2'-fluoro modified
  modified_base 12: mod_base = OTHER; note = 2'-O-methyl modified
  modified_base 13: mod_base = OTHER; note = 2'-O-methyl modified
  modified_base 14: mod_base = OTHER; note = 2'-O-methyl modified
  modified_base 15: mod_base = OTHER; note = 2'-O-methyl modified
  modified_base 16: mod_base = OTHER; note = 2'-O-methyl modified
  modified_base 17: mod_base = OTHER; note = 2'-O-methyl modified
  modified_base 18: mod_base = OTHER; note = 2'-O-methyl modified
  modified_base 19: mod_base = OTHER; note = 2'-O-methyl modified
  modified_base 20: mod_base = OTHER; note = 2'-O-methyl modified
  modified_base 21: mod_base = OTHER; note = 2'-O-methyl modified
  modified_base 22: mod_base = OTHER; note = 2'-O-methyl modified
  modified_base 23: mod_base = OTHER; note = 2'-O-methyl modified
  modified_base 24: mod_base = OTHER; note = 2'-O-methyl modified
  modified_base 25: mod_base = OTHER; note = 2'-O-methyl modified
  modified_base 26: mod_base = OTHER; note = 2'-O-methyl modified
  modified_base 27: mod_base = OTHER; note = 2'-O-methyl modified
  modified_base 28: mod_base = OTHER; note = GalNAc attached
  modified_base 29: mod_base = OTHER; note = GalNAc attached
  modified_base 30: mod_base = OTHER; note = GalNAc attached
  modified_base 31: mod_base = OTHER; note = 2'-O-methyl modified
  modified_base 32: mod_base = OTHER; note = 2'-O-methyl modified
  modified_base 33: mod_base = OTHER; note = 2'-O-methyl modified
  modified_base 34: mod_base = OTHER; note = 2'-O-methyl modified
  modified_base 35: mod_base = OTHER; note = 2'-O-methyl modified
  modified_base 36: mod_base = OTHER; note = 2'-O-methyl modified
  source 1..36: mol_type = other RNA
tgtgtctgctacagactttagcagccgaaaggctgc

SEQ ID NO: 796 - RNA, 36 nt, synthetic construct
  misc_feature 1..36: note = synthetic construct
  modified_base 1: mod_base = OTHER; note = 2'-O-methyl modified with phosphodiester linkage to following ribonucleotide
  modified_base 2: mod_base = OTHER; note = 2'-O-methyl modified
  modified_base 3: mod_base = OTHER; note = 2'-O-methyl modified
  modified_base 4: mod_base = OTHER; note = 2'-O-methyl modified
  modified_base 5: mod_base = OTHER; note = 2'-O-methyl modified
  modified_base 6: mod_base = OTHER; note = 2'-O-methyl modified
  modified_base 7: mod_base = OTHER; note = 2'-O-methyl modified
  modified_base 8: mod_base = OTHER; note = 2'-fluoro modified
  modified_base 9: mod_base = OTHER; note = 2'-fluoro modified
  modified_base 10: mod_base = OTHER; note = 2'-fluoro modified
  modified_base 11: mod_base = OTHER; note = 2'-fluoro modified
  modified_base 12: mod_base = OTHER; note = 2'-O-methyl modified
  modified_base 13: mod_base = OTHER; note = 2'-O-methyl modified
  modified_base 14: mod_base = OTHER; note = 2'-O-methyl modified
  modified_base 15: mod_base = OTHER; note = 2'-O-methyl modified
  modified_base 16: mod_base = OTHER; note = 2'-O-methyl modified
  modified_base 17: mod_base = OTHER; note = 2'-O-methyl modified
  modified_base 18: mod_base = OTHER; note = 2'-O-methyl modified
  modified_base 19: mod_base = OTHER; note = 2'-O-methyl modified
  modified_base 20: mod_base = OTHER; note = 2'-O-methyl modified
  modified_base 21: mod_base = OTHER; note = 2'-O-methyl modified
  modified_base 22: mod_base = OTHER; note = 2'-O-methyl modified
  modified_base 23: mod_base = OTHER; note = 2'-O-methyl modified
  modified_base 24: mod_base = OTHER; note = 2'-O-methyl modified
  modified_base 25: mod_base = OTHER; note = 2'-O-methyl modified
  modified_base 26: mod_base = OTHER; note = 2'-O-methyl modified
  modified_base 27: mod_base = OTHER; note = 2'-O-methyl modified
  modified_base 28: mod_base = OTHER; note = GalNAc attached
  modified_base 29: mod_base = OTHER; note = GalNAc attached
  modified_base 30: mod_base = OTHER; note = GalNAc attached
  modified_base 31: mod_base = OTHER; note = 2'-O-methyl modified
  modified_base 32: mod_base = OTHER; note = 2'-O-methyl modified
  modified_base 33: mod_base = OTHER; note = 2'-O-methyl modified
  modified_base 34: mod_base = OTHER; note = 2'-O-methyl modified
  modified_base 35: mod_base = OTHER; note = 2'-O-methyl modified
  modified_base 36: mod_base = OTHER; note = 2'-O-methyl modified
  source 1..36: mol_type = other RNA
tctgctacagactttgagaagcagccgaaaggctgc

SEQ ID NO: 797 - RNA, 36 nt, synthetic construct
  misc_feature 1..36: note = synthetic construct
  modified_base 1: mod_base = OTHER; note = 2'-O-methyl modified with phosphodiester linkage to following ribonucleotide
  modified_base 2: mod_base = OTHER; note = 2'-O-methyl modified
  modified_base 3: mod_base = OTHER; note = 2'-O-methyl modified
  modified_base 4: mod_base = OTHER; note = 2'-O-methyl modified
  modified_base 5: mod_base = OTHER; note = 2'-O-methyl modified
  modified_base 6: mod_base = OTHER; note = 2'-O-methyl modified
  modified_base 7: mod_base = OTHER; note = 2'-O-methyl modified
  modified_base 8: mod_base = OTHER; note = 2'-fluoro modified
  modified_base 9: mod_base = OTHER; note = 2'-fluoro modified
  modified_base 10: mod_base = OTHER; note = 2'-fluoro modified
  modified_base 11: mod_base = OTHER; note = 2'-fluoro modified
  modified_base 12: mod_base = OTHER; note = 2'-O-methyl modified
  modified_base 13: mod_base = OTHER; note = 2'-O-methyl modified
  modified_base 14: mod_base = OTHER; note = 2'-O-methyl modified
  modified_base 15: mod_base = OTHER; note = 2'-O-methyl modified
  modified_base 16: mod_base = OTHER; note = 2'-O-methyl modified
  modified_base 17: mod_base = OTHER; note = 2'-O-methyl modified
  modified_base 18: mod_base = OTHER; note = 2'-O-methyl modified
  modified_base 19: mod_base = OTHER; note = 2'-O-methyl modified
  modified_base 20: mod_base = OTHER; note = 2'-O-methyl modified
  modified_base 21: mod_base = OTHER; note = 2'-O-methyl modified
  modified_base 22: mod_base = OTHER; note = 2'-O-methyl modified
  modified_base 23: mod_base = OTHER; note = 2'-O-methyl modified
  modified_base 24: mod_base = OTHER; note = 2'-O-methyl modified
  modified_base 25: mod_base = OTHER; note = 2'-O-methyl modified
  modified_base 26: mod_base = OTHER; note = 2'-O-methyl modified
  modified_base 27: mod_base = OTHER; note = 2'-O-methyl modified
  modified_base 28: mod_base = OTHER; note = GalNAc attached
  modified_base 29: mod_base = OTHER; note = GalNAc attached
  modified_base 30: mod_base = OTHER; note = GalNAc attached
  modified_base 31: mod_base = OTHER; note = 2'-O-methyl modified
  modified_base 32: mod_base = OTHER; note = 2'-O-methyl modified
  modified_base 33: mod_base = OTHER; note = 2'-O-methyl modified
  modified_base 34: mod_base = OTHER; note = 2'-O-methyl modified
  modified_base 35: mod_base = OTHER; note = 2'-O-methyl modified
  modified_base 36: mod_base = OTHER; note = 2'-O-methyl modified
  source 1..36: mol_type = other RNA
acagactttgagaaggttgagcagccgaaaggctgc

SEQ ID NO: 798 - RNA, 36 nt, synthetic construct
  misc_feature 1..36: note = synthetic construct
  modified_base 1: mod_base = OTHER; note = 2'-O-methyl modified with phosphodiester linkage to following ribonucleotide
  modified_base 2: mod_base = OTHER; note = 2'-O-methyl modified
  modified_base 3: mod_base = OTHER; note = 2'-O-methyl modified
  modified_base 4: mod_base = OTHER; note = 2'-O-methyl modified
  modified_base 5: mod_base = OTHER; note = 2'-O-methyl modified
  modified_base 6: mod_base = OTHER; note = 2'-O-methyl modified
  modified_base 7: mod_base = OTHER; note = 2'-O-methyl modified
  modified_base 8: mod_base = OTHER; note = 2'-fluoro modified
  modified_base 9: mod_base = OTHER; note = 2'-fluoro modified
  modified_base 10: mod_base = OTHER; note = 2'-fluoro modified
  modified_base 11: mod_base = OTHER; note = 2'-fluoro modified
  modified_base 12: mod_base = OTHER; note = 2'-O-methyl modified
  modified_base 13: mod_base = OTHER; note = 2'-O-methyl modified
  modified_base 14: mod_base = OTHER; note = 2'-O-methyl modified
  modified_base 15: mod_base = OTHER; note = 2'-O-methyl modified
  modified_base 16: mod_base = OTHER; note = 2'-O-methyl modified
  modified_base 17: mod_base = OTHER; note = 2'-O-methyl modified
  modified_base 18: mod_base = OTHER; note = 2'-O-methyl modified
  modified_base 19: mod_base = OTHER; note = 2'-O-methyl modified
  modified_base 20: mod_base = OTHER; note = 2'-O-methyl modified
  modified_base 21: mod_base = OTHER; note = 2'-O-methyl modified
  modified_base 22: mod_base = OTHER; note = 2'-O-methyl modified
  modified_base 23: mod_base = OTHER; note = 2'-O-methyl modified
  modified_base 24: mod_base = OTHER; note = 2'-O-methyl modified
  modified_base 25: mod_base = OTHER; note = 2'-O-methyl modified
  modified_base 26: mod_base = OTHER; note = 2'-O-methyl modified
  modified_base 27: mod_base = OTHER; note = 2'-O-methyl modified
  modified_base 28: mod_base = OTHER; note = GalNAc attached
  modified_base 29: mod_base = OTHER; note = GalNAc attached
  modified_base 30: mod_base = OTHER; note = GalNAc attached
  modified_base 31: mod_base = OTHER; note = 2'-O-methyl modified
  modified_base 32: mod_base = OTHER; note = 2'-O-methyl modified
  modified_base 33: mod_base = OTHER; note = 2'-O-methyl modified
  modified_base 34: mod_base = OTHER; note = 2'-O-methyl modified
  modified_base 35: mod_base = OTHER; note = 2'-O-methyl modified
  modified_base 36: mod_base = OTHER; note = 2'-O-methyl modified
  source 1..36: mol_type = other RNA
agactttgagaaggttgatagcagccgaaaggctgc

SEQ ID NO: 799 - RNA, 36 nt, synthetic construct
  misc_feature 1..36: note = synthetic construct
  modified_base 1: mod_base = OTHER; note = 2'-O-methyl modified with phosphodiester linkage to following ribonucleotide
  modified_base 2: mod_base = OTHER; note = 2'-O-methyl modified
  modified_base 3: mod_base = OTHER; note = 2'-O-methyl modified
  modified_base 4: mod_base = OTHER; note = 2'-O-methyl modified
  modified_base 5: mod_base = OTHER; note = 2'-O-methyl modified
  modified_base 6: mod_base = OTHER; note = 2'-O-methyl modified
  modified_base 7: mod_base = OTHER; note = 2'-O-methyl modified
  modified_base 8: mod_base = OTHER; note = 2'-fluoro modified
  modified_base 9: mod_base = OTHER; note = 2'-fluoro modified
  modified_base 10: mod_base = OTHER; note = 2'-fluoro modified
  modified_base 11: mod_base = OTHER; note = 2'-fluoro modified
  modified_base 12: mod_base = OTHER; note = 2'-O-methyl modified
  modified_base 13: mod_base = OTHER; note = 2'-O-methyl modified
  modified_base 14: mod_base = OTHER; note = 2'-O-methyl modified
  modified_base 15: mod_base = OTHER; note = 2'-O-methyl modified
  modified_base 16: mod_base = OTHER; note = 2'-O-methyl modified
  modified_base 17: mod_base = OTHER; note = 2'-O-methyl modified
  modified_base 18: mod_base = OTHER; note = 2'-O-methyl modified
  modified_base 19: mod_base = OTHER; note = 2'-O-methyl modified
  modified_base 20: mod_base = OTHER; note = 2'-O-methyl modified
  modified_base 21: mod_base = OTHER; note = 2'-O-methyl modified
  modified_base 22: mod_base = OTHER; note = 2'-O-methyl modified
  modified_base 23: mod_base = OTHER; note = 2'-O-methyl modified
  modified_base 24: mod_base = OTHER; note = 2'-O-methyl modified
  modified_base 25: mod_base = OTHER; note = 2'-O-methyl modified
  modified_base 26: mod_base = OTHER; note = 2'-O-methyl modified
  modified_base 27: mod_base = OTHER; note = 2'-O-methyl modified
  modified_base 28: mod_base = OTHER; note = GalNAc attached
  modified_base 29: mod_base = OTHER; note = GalNAc attached
  modified_base 30: mod_base = OTHER; note = GalNAc attached
  modified_base 31: mod_base = OTHER; note = 2'-O-methyl modified
  modified_base 32: mod_base = OTHER; note = 2'-O-methyl modified
  modified_base 33: mod_base = OTHER; note = 2'-O-methyl modified
  modified_base 34: mod_base = OTHER; note = 2'-O-methyl modified
  modified_base 35: mod_base = OTHER; note = 2'-O-methyl modified
  modified_base 36: mod_base = OTHER; note = 2'-O-methyl modified
  source 1..36: mol_type = other RNA
tgatctgacccagttcaagagcagccgaaaggctgc

SEQ ID NO: 800 - RNA, 36 nt, synthetic construct
  misc_feature 1..36: note = synthetic construct
  modified_base 1: mod_base = OTHER; note = 2'-O-methyl modified with phosphodiester linkage to following ribonucleotide
  modified_base 2: mod_base = OTHER; note = 2'-O-methyl modified
  modified_base 3: mod_base = OTHER; note = 2'-O-methyl modified
  modified_base 4: mod_base = OTHER; note = 2'-O-methyl modified
  modified_base 5: mod_base = OTHER; note = 2'-O-methyl modified
  modified_base 6: mod_base = OTHER; note = 2'-O-methyl modified
  modified_base 7: mod_base = OTHER; note = 2'-O-methyl modified
  modified_base 8: mod_base = OTHER; note = 2'-fluoro modified
  modified_base 9: mod_base = OTHER; note = 2'-fluoro modified
  modified_base 10: mod_base = OTHER; note = 2'-fluoro modified
  modified_base 11: mod_base = OTHER; note = 2'-fluoro modified
  modified_base 12: mod_base = OTHER; note = 2'-O-methyl modified
  modified_base 13: mod_base = OTHER; note = 2'-O-methyl modified
  modified_base 14: mod_base = OTHER; note = 2'-O-methyl modified
  modified_base 15: mod_base = OTHER; note = 2'-O-methyl modified
  modified_base 16: mod_base = OTHER; note = 2'-O-methyl modified
  modified_base 17: mod_base = OTHER; note = 2'-O-methyl modified
  modified_base 18: mod_base = OTHER; note = 2'-O-methyl modified
  modified_base 19: mod_base = OTHER; note = 2'-O-methyl modified
  modified_base 20: mod_base = OTHER; note = 2'-O-methyl modified
  modified_base 21: mod_base = OTHER; note = 2'-O-methyl modified
  modified_base 22: mod_base = OTHER; note = 2'-O-methyl modified
  modified_base 23: mod_base = OTHER; note = 2'-O-methyl modified
  modified_base 24: mod_base = OTHER; note = 2'-O-methyl modified
  modified_base 25: mod_base = OTHER; note = 2'-O-methyl modified
  modified_base 26: mod_base = OTHER; note = 2'-O-methyl modified
  modified_base 27: mod_base = OTHER; note = 2'-O-methyl modified
  modified_base 28: mod_base = OTHER; note = GalNAc attached
  modified_base 29: mod_base = OTHER; note = GalNAc attached
  modified_base 30: mod_base = OTHER; note = GalNAc attached
  modified_base 31: mod_base = OTHER; note = 2'-O-methyl modified
  modified_base 32: mod_base = OTHER; note = 2'-O-methyl modified
  modified_base 33: mod_base = OTHER; note = 2'-O-methyl modified
  modified_base 34: mod_base = OTHER; note = 2'-O-methyl modified
  modified_base 35: mod_base = OTHER; note = 2'-O-methyl modified
  modified_base 36: mod_base = OTHER; note = 2'-O-methyl modified
  source 1..36: mol_type = other RNA
ctacggagacgtggtgtttagcagccgaaaggctgc

SEQ ID NO: 801 - RNA, 36 nt, synthetic construct
  misc_feature 1..36: note = synthetic construct
  modified_base 1: mod_base = OTHER; note = 2'-O-methyl modified with phosphodiester linkage to following ribonucleotide
  modified_base 2: mod_base = OTHER; note = 2'-O-methyl modified
  modified_base 3: mod_base = OTHER; note = 2'-O-methyl modified
  modified_base 4: mod_base = OTHER; note = 2'-O-methyl modified
  modified_base 5: mod_base = OTHER; note = 2'-O-methyl modified
  modified_base 6: mod_base = OTHER; note = 2'-O-methyl modified
  modified_base 7: mod_base = OTHER; note = 2'-O-methyl modified
  modified_base 8: mod_base = OTHER; note = 2'-fluoro modified
  modified_base 9: mod_base = OTHER; note = 2'-fluoro modified
  modified_base 10: mod_base = OTHER; note = 2'-fluoro modified
  modified_base 11: mod_base = OTHER; note = 2'-fluoro modified
  modified_base 12: mod_base = OTHER; note = 2'-O-methyl modified
  modified_base 13: mod_base = OTHER; note = 2'-O-methyl modified
  modified_base 14: mod_base = OTHER; note = 2'-O-methyl modified
  modified_base 15: mod_base = OTHER; note = 2'-O-methyl modified
  modified_base 16: mod_base = OTHER; note = 2'-O-methyl modified
  modified_base 17: mod_base = OTHER; note = 2'-O-methyl modified
  modified_base 18: mod_base = OTHER; note = 2'-O-methyl modified
  modified_base 19: mod_base = OTHER; note = 2'-O-methyl modified
  modified_base 20: mod_base = OTHER; note = 2'-O-methyl modified
  modified_base 21: mod_base = OTHER; note = 2'-O-methyl modified
  modified_base 22: mod_base = OTHER; note = 2'-O-methyl modified
  modified_base 23: mod_base = OTHER; note = 2'-O-methyl modified
  modified_base 24: mod_base = OTHER; note = 2'-O-methyl modified
  modified_base 25: mod_base = OTHER; note = 2'-O-methyl modified
  modified_base 26: mod_base = OTHER; note = 2'-O-methyl modified
  modified_base 27: mod_base = OTHER; note = 2'-O-methyl modified
  modified_base 28: mod_base = OTHER; note = GalNAc attached
  modified_base 29: mod_base = OTHER; note = GalNAc attached
  modified_base 30: mod_base = OTHER; note = GalNAc attached
  modified_base 31: mod_base = OTHER; note = 2'-O-methyl modified
  modified_base 32: mod_base = OTHER; note = 2'-O-methyl modified
  modified_base 33: mod_base = OTHER; note = 2'-O-methyl modified
  modified_base 34: mod_base = OTHER; note = 2'-O-methyl modified
  modified_base 35: mod_base = OTHER; note = 2'-O-methyl modified
  modified_base 36: mod_base = OTHER; note = 2'-O-methyl modified
  source 1..36: mol_type = other RNA
gtgtttgtcagcaaagatgagcagccgaaaggctgc

SEQ ID NO: 802 - RNA, 36 nt, synthetic construct
  misc_feature 1..36: note = synthetic construct
  modified_base 1: mod_base = OTHER; note = 2'-O-methyl modified with phosphodiester linkage to following ribonucleotide
  modified_base 2: mod_base = OTHER; note = 2'-O-methyl modified
  modified_base 3: mod_base = OTHER; note = 2'-O-methyl modified
  modified_base 4: mod_base = OTHER; note = 2'-O-methyl modified
  modified_base 5: mod_base = OTHER; note = 2'-O-methyl modified
  modified_base 6: mod_base = OTHER; note = 2'-O-methyl modified
  modified_base 7: mod_base = OTHER; note = 2'-O-methyl modified
  modified_base 8: mod_base = OTHER; note = 2'-fluoro modified
  modified_base 9: mod_base = OTHER; note = 2'-fluoro modified
  modified_base 10: mod_base = OTHER; note = 2'-fluoro modified
  modified_base 11: mod_base = OTHER; note = 2'-fluoro modified
  modified_base 12: mod_base = OTHER; note = 2'-O-methyl modified
  modified_base 13: mod_base = OTHER; note = 2'-O-methyl modified
  modified_base 14: mod_base = OTHER; note = 2'-O-methyl modified
  modified_base 15: mod_base = OTHER; note = 2'-O-methyl modified
  modified_base 16: mod_base = OTHER; note = 2'-O-methyl modified
  modified_base 17: mod_base = OTHER; note = 2'-O-methyl modified
  modified_base 18: mod_base = OTHER; note = 2'-O-methyl modified
  modified_base 19: mod_base = OTHER; note = 2'-O-methyl modified
  modified_base 20: mod_base = OTHER; note = 2'-O-methyl modified
  modified_base 21: mod_base = OTHER; note = 2'-O-methyl modified
  modified_base 22: mod_base = OTHER; note = 2'-O-methyl modified
  modified_base 23: mod_base = OTHER; note = 2'-O-methyl modified
  modified_base 24: mod_base = OTHER; note = 2'-O-methyl modified
  modified_base 25: mod_base = OTHER; note = 2'-O-methyl modified
  modified_base 26: mod_base = OTHER; note = 2'-O-methyl modified
  modified_base 27: mod_base = OTHER; note = 2'-O-methyl modified
  modified_base 28: mod_base = OTHER; note = GalNAc attached
  modified_base 29: mod_base = OTHER; note = GalNAc attached
  modified_base 30: mod_base = OTHER; note = GalNAc attached
  modified_base 31: mod_base = OTHER; note = 2'-O-methyl modified
  modified_base 32: mod_base = OTHER; note = 2'-O-methyl modified
  modified_base 33: mod_base = OTHER; note = 2'-O-methyl modified
  modified_base 34: mod_base = OTHER; note = 2'-O-methyl modified
  modified_base 35: mod_base = OTHER; note = 2'-O-methyl modified
  modified_base 36: mod_base = OTHER; note = 2'-O-methyl modified
  source 1..36: mol_type = other RNA
tttgtcagcaaagatgtggagcagccgaaaggctgc

SEQ ID NO: 803 - RNA, 36 nt, synthetic construct
  misc_feature 1..36: note = synthetic construct
  modified_base 1: mod_base = OTHER; note = 2'-O-methyl modified with phosphodiester linkage to following ribonucleotide
  modified_base 2: mod_base = OTHER; note = 2'-O-methyl modified
  modified_base 3: mod_base = OTHER; note = 2'-O-methyl modified
  modified_base 4: mod_base = OTHER; note = 2'-O-methyl modified
  modified_base 5: mod_base = OTHER; note = 2'-O-methyl modified
  modified_base 6: mod_base = OTHER; note = 2'-O-methyl modified
  modified_base 7: mod_base = OTHER; note = 2'-O-methyl modified
  modified_base 8: mod_base = OTHER; note = 2'-fluoro modified
  modified_base 9: mod_base = OTHER; note = 2'-fluoro modified
  modified_base 10: mod_base = OTHER; note = 2'-fluoro modified
  modified_base 11: mod_base = OTHER; note = 2'-fluoro modified
  modified_base 12: mod_base = OTHER; note = 2'-O-methyl modified
  modified_base 13: mod_base = OTHER; note = 2'-O-methyl modified
  modified_base 14: mod_base = OTHER; note = 2'-O-methyl modified
  modified_base 15: mod_base = OTHER; note = 2'-O-methyl modified
  modified_base 16: mod_base = OTHER; note = 2'-O-methyl modified
  modified_base 17: mod_base = OTHER; note = 2'-O-methyl modified
  modified_base 18: mod_base = OTHER; note = 2'-O-methyl modified
  modified_base 19: mod_base = OTHER; note = 2'-O-methyl modified
  modified_base 20: mod_base = OTHER; note = 2'-O-methyl modified
  modified_base 21: mod_base = OTHER; note = 2'-O-methyl modified
  modified_base 22: mod_base = OTHER; note = 2'-O-methyl modified
  modified_base 23: mod_base = OTHER; note = 2'-O-methyl modified
  modified_base 24: mod_base = OTHER; note = 2'-O-methyl modified
  modified_base 25: mod_base = OTHER; note = 2'-O-methyl modified
  modified_base 26: mod_base = OTHER; note = 2'-O-methyl modified
  modified_base 27: mod_base = OTHER; note = 2'-O-methyl modified
  modified_base 28: mod_base = OTHER; note = GalNAc attached
  modified_base 29: mod_base = OTHER; note = GalNAc attached
  modified_base 30: mod_base = OTHER; note = GalNAc attached
  modified_base 31: mod_base = OTHER; note = 2'-O-methyl modified
  modified_base 32: mod_base = OTHER; note = 2'-O-methyl modified
  modified_base 33: mod_base = OTHER; note = 2'-O-methyl modified
  modified_base 34: mod_base = OTHER; note = 2'-O-methyl modified
  modified_base 35: mod_base = OTHER; note = 2'-O-methyl modified
  modified_base 36: mod_base = OTHER; note = 2'-O-methyl modified
  source 1..36: mol_type = other RNA
cttggggttccagtcagcaagcagccgaaaggctgc

SEQ ID NO: 804 - RNA, 36 nt, synthetic construct
  misc_feature 1..36: note = synthetic construct
  modified_base 1: mod_base = OTHER; note = 2'-O-methyl modified with phosphodiester linkage to following ribonucleotide
  modified_base 2: mod_base = OTHER; note = 2'-O-methyl modified
  modified_base 3: mod_base = OTHER; note = 2'-O-methyl modified
  modified_base 4: mod_base = OTHER; note = 2'-O-methyl modified
  modified_base 5: mod_base = OTHER; note = 2'-O-methyl modified
  modified_base 6: mod_base = OTHER; note = 2'-O-methyl modified
  modified_base 7: mod_base = OTHER; note = 2'-O-methyl modified
  modified_base 8: mod_base = OTHER; note = 2'-fluoro modified
  modified_base 9: mod_base = OTHER; note = 2'-fluoro modified
  modified_base 10: mod_base = OTHER; note = 2'-fluoro modified
  modified_base 11: mod_base = OTHER; note = 2'-fluoro modified
  modified_base 12: mod_base = OTHER; note = 2'-O-methyl modified
  modified_base 13: mod_base = OTHER; note = 2'-O-methyl modified
  modified_base 14: mod_base = OTHER; note = 2'-O-methyl modified
  modified_base 15: mod_base = OTHER; note = 2'-O-methyl modified
  modified_base 16: mod_base = OTHER; note = 2'-O-methyl modified
  modified_base 17: mod_base = OTHER; note = 2'-O-methyl modified
  modified_base 18: mod_base = OTHER; note = 2'-O-methyl modified
  modified_base 19: mod_base = OTHER; note = 2'-O-methyl modified
  modified_base 20: mod_base = OTHER; note = 2'-O-methyl modified
  modified_base 21: mod_base = OTHER; note = 2'-O-methyl modified
  modified_base 22: mod_base = OTHER; note = 2'-O-methyl modified
  modified_base 23: mod_base = OTHER; note = 2'-O-methyl modified
  modified_base 24: mod_base = OTHER; note = 2'-O-methyl modified
  modified_base 25: mod_base = OTHER; note = 2'-O-methyl modified
  modified_base 26: mod_base = OTHER; note = 2'-O-methyl modified
  modified_base 27: mod_base = OTHER; note = 2'-O-methyl modified
  modified_base 28: mod_base = OTHER; note = GalNAc attached
  modified_base 29: mod_base = OTHER; note = GalNAc attached
  modified_base 30: mod_base = OTHER; note = GalNAc attached
  modified_base 31: mod_base = OTHER; note = 2'-O-methyl modified
  modified_base 32: mod_base = OTHER; note = 2'-O-methyl modified
  modified_base 33: mod_base = OTHER; note = 2'-O-methyl modified
  modified_base 34: mod_base = OTHER; note = 2'-O-methyl modified
  modified_base 35: mod_base = OTHER; note = 2'-O-methyl modified
  modified_base 36: mod_base = OTHER; note = 2'-O-methyl modified
  source 1..36: mol_type = other RNA
gcaggaagcactgagattcagcagccgaaaggctgc

SEQ ID NO: 805 - RNA, 36 nt, synthetic construct; identical to SEQ ID NO: 775
  misc_feature 1..36: note = synthetic construct
  modified_base 1: mod_base = OTHER; note = 2'-O-methyl modified with phosphodiester linkage to following ribonucleotide
  modified_base 2: mod_base = OTHER; note = 2'-O-methyl modified
  modified_base 3: mod_base = OTHER; note = 2'-fluoro modified
  modified_base 4: mod_base = OTHER; note = 2'-O-methyl modified
  modified_base 5: mod_base = OTHER; note = 2'-O-methyl modified
  modified_base 6: mod_base = OTHER; note = 2'-O-methyl modified
  modified_base 7: mod_base = OTHER; note = 2'-O-methyl modified
  modified_base 8: mod_base = OTHER; note = 2'-fluoro modified
  modified_base 9: mod_base = OTHER; note = 2'-fluoro modified
  modified_base 10: mod_base = OTHER; note = 2'-fluoro modified
  modified_base 11: mod_base = OTHER; note = 2'-O-methyl modified
  modified_base 12: mod_base = OTHER; note = 2'-fluoro modified
  modified_base 13: mod_base = OTHER; note = 2'-fluoro modified
  modified_base 14: mod_base = OTHER; note = 2'-O-methyl modified
  modified_base 15: mod_base = OTHER; note = 2'-O-methyl modified
  modified_base 16: mod_base = OTHER; note = 2'-O-methyl modified
  modified_base 17: mod_base = OTHER; note = 2'-fluoro modified
  modified_base 18: mod_base = OTHER; note = 2'-O-methyl modified
  modified_base 19: mod_base = OTHER; note = 2'-O-methyl modified
  modified_base 20: mod_base = OTHER; note = 2'-O-methyl modified
  modified_base 21: mod_base = OTHER; note = 2'-O-methyl modified
  modified_base 22: mod_base = OTHER; note = 2'-O-methyl modified
  modified_base 23: mod_base = OTHER; note = 2'-O-methyl modified
  modified_base 24: mod_base = OTHER; note = 2'-O-methyl modified
  modified_base 25: mod_base = OTHER; note = 2'-O-methyl modified
  modified_base 26: mod_base = OTHER; note = 2'-O-methyl modified
  modified_base 27: mod_base = OTHER; note = 2'-O-methyl modified
  modified_base 28: mod_base = OTHER; note = GalNAc attached
  modified_base 29: mod_base = OTHER; note = GalNAc attached
  modified_base 30: mod_base = OTHER; note = GalNAc attached
  modified_base 31: mod_base = OTHER; note = 2'-O-methyl modified
  modified_base 32: mod_base = OTHER; note = 2'-O-methyl modified
  modified_base 33: mod_base = OTHER; note = 2'-O-methyl modified
  modified_base 34: mod_base = OTHER; note = 2'-O-methyl modified
  modified_base 35: mod_base = OTHER; note = 2'-O-methyl modified
  modified_base 36: mod_base = OTHER; note = 2'-O-methyl modified
  source 1..36: mol_type = other RNA

SEQ ID NO: 806 - RNA, 36 nt, synthetic construct
  misc_feature 1..36: note = synthetic construct
  modified_base 1: mod_base = OTHER; note = 2'-O-methyl modified with phosphodiester linkage to following ribonucleotide
  modified_base 2: mod_base = OTHER; note = 2'-O-methyl modified
  modified_base 3: mod_base = OTHER; note = 2'-fluoro modified
  modified_base 4: mod_base = OTHER; note = 2'-O-methyl modified
  modified_base 5: mod_base = OTHER; note = 2'-O-methyl modified
  modified_base 6: mod_base = OTHER; note = 2'-O-methyl modified
  modified_base 7: mod_base = OTHER; note = 2'-O-methyl modified
  modified_base 8: mod_base = OTHER; note = 2'-fluoro modified
  modified_base 9: mod_base = OTHER; note = 2'-fluoro modified
  modified_base 10: mod_base = OTHER; note = 2'-fluoro modified
  modified_base 11: mod_base = OTHER; note = 2'-O-methyl modified
  modified_base 12: mod_base = OTHER; note = 2'-fluoro modified
  modified_base 13: mod_base = OTHER; note = 2'-fluoro modified
  modified_base 14: mod_base = OTHER; note = 2'-O-methyl modified
  modified_base 15: mod_base = OTHER; note = 2'-O-methyl modified
  modified_base 16: mod_base = OTHER; note = 2'-O-methyl modified
  modified_base 17: mod_base = OTHER; note = 2'-fluoro modified
  modified_base 18: mod_base = OTHER; note = 2'-O-methyl modified
  modified_base 19: mod_base = OTHER; note = 2'-O-methyl modified
  modified_base 20: mod_base = OTHER; note = 2'-O-methyl modified
  modified_base 21: mod_base = OTHER; note = 2'-O-methyl modified
  modified_base 22: mod_base = OTHER; note = 2'-O-methyl modified
  modified_base 23: mod_base = OTHER; note = 2'-O-methyl modified
  modified_base 24: mod_base = OTHER; note = 2'-O-methyl modified
  modified_base 25: mod_base = OTHER; note = 2'-O-methyl modified
  modified_base 26: mod_base = OTHER; note = 2'-O-methyl modified
  modified_base 27: mod_base = OTHER; note = 2'-O-methyl modified
  modified_base 28: mod_base = OTHER; note = GalNAc attached
  modified_base 29: mod_base = OTHER; note = GalNAc attached
  modified_base 30: mod_base = OTHER; note = GalNAc attached
  modified_base 31: mod_base = OTHER; note = 2'-O-methyl modified
  modified_base 32: mod_base = OTHER; note = 2'-O-methyl modified
  modified_base 33: mod_base = OTHER; note = 2'-O-methyl modified
  modified_base 34: mod_base = OTHER; note = 2'-O-methyl modified
  modified_base 35: mod_base = OTHER; note = 2'-O-methyl modified
  modified_base 36: mod_base = OTHER; note = 2'-O-methyl modified
  source 1..36: mol_type = other RNA
tgctgcatcatcaacaactagcagccgaaaggctgc

SEQ ID NO: 807 - RNA, 36 nt, synthetic construct; identical to SEQ ID NO: 776
  misc_feature 1..36: note = synthetic construct
  modified_base 1: mod_base = OTHER; note = 2'-O-methyl modified with phosphodiester linkage to following ribonucleotide
  modified_base 2: mod_base = OTHER; note = 2'-O-methyl modified
  modified_base 3: mod_base = OTHER; note = 2'-fluoro modified
  modified_base 4: mod_base = OTHER; note = 2'-O-methyl modified
  modified_base 5: mod_base = OTHER; note = 2'-O-methyl modified
  modified_base 6: mod_base = OTHER; note = 2'-O-methyl modified
  modified_base 7: mod_base = OTHER; note = 2'-O-methyl modified
  modified_base 8: mod_base = OTHER; note = 2'-fluoro modified
  modified_base 9: mod_base = OTHER; note = 2'-fluoro modified
  modified_base 10: mod_base = OTHER; note = 2'-fluoro modified
  modified_base 11: mod_base = OTHER; note = 2'-O-methyl modified
  modified_base 12: mod_base = OTHER; note = 2'-fluoro modified
  modified_base 13: mod_base = OTHER; note = 2'-fluoro modified
  modified_base 14: mod_base = OTHER; note = 2'-O-methyl modified
  modified_base 15: mod_base = OTHER; note = 2'-O-methyl modified
  modified_base 16: mod_base = OTHER; note = 2'-O-methyl modified
  modified_base 17: mod_base = OTHER; note = 2'-fluoro modified
  modified_base 18: mod_base = OTHER; note = 2'-O-methyl modified
  modified_base 19: mod_base = OTHER; note = 2'-O-methyl modified
  modified_base 20: mod_base = OTHER; note = 2'-O-methyl modified
  modified_base 21: mod_base = OTHER; note = 2'-O-methyl modified
  modified_base 22: mod_base = OTHER; note = 2'-O-methyl modified
  modified_base 23: mod_base = OTHER; note = 2'-O-methyl modified
  modified_base 24: mod_base = OTHER; note = 2'-O-methyl modified
  modified_base 25: mod_base = OTHER; note = 2'-O-methyl modified
  modified_base 26: mod_base = OTHER; note = 2'-O-methyl modified
  modified_base 27: mod_base = OTHER; note = 2'-O-methyl modified
  modified_base 28: mod_base = OTHER; note = GalNAc attached
  modified_base 29: mod_base = OTHER; note = GalNAc attached
  modified_base 30: mod_base = OTHER; note = GalNAc attached
  modified_base 31: mod_base = OTHER; note = 2'-O-methyl modified
  modified_base 32: mod_base = OTHER; note = 2'-O-methyl modified
  modified_base 33: mod_base = OTHER; note = 2'-O-methyl modified
  modified_base 34: mod_base = OTHER; note = 2'-O-methyl modified
  modified_base 35: mod_base = OTHER; note = 2'-O-methyl modified
  modified_base 36: mod_base = OTHER; note = 2'-O-methyl modified
  source 1..36: mol_type = other RNA

SEQ ID NO: 808 - RNA, 36 nt, synthetic construct; identical to SEQ ID NO: 778
  misc_feature 1..36: note = synthetic construct
  modified_base 1: mod_base = OTHER; note = 2'-O-methyl modified with phosphodiester linkage to following ribonucleotide
  modified_base 2: mod_base = OTHER; note = 2'-O-methyl modified
  modified_base 3: mod_base = OTHER; note = 2'-fluoro modified
  modified_base 4: mod_base = OTHER; note = 2'-O-methyl modified
  modified_base 5: mod_base = OTHER; note = 2'-O-methyl modified
  modified_base 6: mod_base = OTHER; note = 2'-O-methyl modified
  modified_base 7: mod_base = OTHER; note = 2'-O-methyl modified
  modified_base 8: mod_base = OTHER; note = 2'-fluoro modified
  modified_base 9: mod_base = OTHER; note = 2'-fluoro modified
  modified_base 10: mod_base = OTHER; note = 2'-fluoro modified
  modified_base 11: mod_base = OTHER; note = 2'-O-methyl modified
  modified_base 12: mod_base = OTHER; note = 2'-fluoro modified
  modified_base 13: mod_base = OTHER; note = 2'-fluoro modified
  modified_base 14: mod_base = OTHER; note = 2'-O-methyl modified
  modified_base 15: mod_base = OTHER; note = 2'-O-methyl modified
  modified_base 16: mod_base = OTHER; note = 2'-O-methyl modified
  modified_base 17: mod_base = OTHER; note = 2'-fluoro modified
  modified_base 18: mod_base = OTHER; note = 2'-O-methyl modified
  modified_base 19: mod_base = OTHER; note = 2'-O-methyl modified
  modified_base 20: mod_base = OTHER; note = 2'-O-methyl modified
  modified_base 21: mod_base = OTHER; note = 2'-O-methyl modified
  modified_base 22: mod_base = OTHER; note = 2'-O-methyl modified
  modified_base 23: mod_base = OTHER; note = 2'-O-methyl modified
  modified_base 24: mod_base = OTHER; note = 2'-O-methyl modified
  modified_base 25: mod_base = OTHER; note = 2'-O-methyl modified
  modified_base 26: mod_base = OTHER; note = 2'-O-methyl modified
  modified_base 27: mod_base = OTHER; note = 2'-O-methyl modified
  modified_base 28: mod_base = OTHER; note = GalNAc attached
  modified_base 29: mod_base = OTHER; note = GalNAc attached
  modified_base 30: mod_base = OTHER; note = GalNAc attached
  modified_base 31: mod_base = OTHER; note = 2'-O-methyl modified
  modified_base 32: mod_base = OTHER; note = 2'-O-methyl modified
  modified_base 33: mod_base = OTHER; note = 2'-O-methyl modified
  modified_base 34: mod_base = OTHER; note = 2'-O-methyl modified
  modified_base 35: mod_base = OTHER; note = 2'-O-methyl modified
  modified_base 36: mod_base = OTHER; note = 2'-O-methyl modified
  source 1..36: mol_type = other RNA

SEQ ID NO: 809 - RNA, 36 nt, synthetic construct; identical to SEQ ID NO: 779
  misc_feature 1..36: note = synthetic construct
  modified_base 1: mod_base = OTHER; note = 2'-O-methyl modified with phosphodiester linkage to following ribonucleotide
  modified_base 2: mod_base = OTHER; note = 2'-O-methyl modified
  modified_base 3: mod_base = OTHER; note = 2'-fluoro modified
  modified_base 4: mod_base = OTHER; note = 2'-O-methyl modified
  modified_base 5: mod_base = OTHER; note = 2'-O-methyl modified
  modified_base 6: mod_base = OTHER; note = 2'-O-methyl modified
  modified_base 7: mod_base = OTHER; note = 2'-O-methyl modified
  modified_base 8: mod_base = OTHER; note = 2'-fluoro modified
  modified_base 9: mod_base = OTHER; note = 2'-fluoro modified
  modified_base 10: mod_base = OTHER; note = 2'-fluoro modified
  modified_base 11: mod_base = OTHER; note = 2'-O-methyl modified
  modified_base 12: mod_base = OTHER; note = 2'-fluoro modified
  modified_base 13: mod_base = OTHER; note = 2'-fluoro modified
  modified_base 14: mod_base = OTHER; note = 2'-O-methyl modified
  modified_base 15: mod_base = OTHER; note = 2'-O-methyl modified
  modified_base 16: mod_base = OTHER; note = 2'-O-methyl modified
  modified_base 17: mod_base = OTHER; note = 2'-fluoro modified
  modified_base 18: mod_base = OTHER; note = 2'-O-methyl modified
  modified_base 19: mod_base = OTHER; note = 2'-O-methyl modified
  modified_base 20: mod_base = OTHER; note = 2'-O-methyl modified
  modified_base 21: mod_base = OTHER; note = 2'-O-methyl modified
  modified_base 22: mod_base = OTHER; note = 2'-O-methyl modified
  modified_base 23: mod_base = OTHER; note = 2'-O-methyl modified
  modified_base 24: mod_base = OTHER; note = 2'-O-methyl modified
  modified_base 25: mod_base = OTHER; note = 2'-O-methyl modified
  modified_base 26: mod_base = OTHER; note = 2'-O-methyl modified
  modified_base 27: mod_base = OTHER; note = 2'-O-methyl modified
  modified_base 28: mod_base = OTHER; note = GalNAc attached
  modified_base 29: mod_base = OTHER; note = GalNAc attached
  modified_base 30: mod_base = OTHER; note = GalNAc attached
  modified_base 31: mod_base = OTHER; note = 2'-O-methyl modified
  modified_base 32: mod_base = OTHER; note = 2'-O-methyl modified
  modified_base 33: mod_base = OTHER; note = 2'-O-methyl modified
  modified_base 34: mod_base = OTHER; note = 2'-O-methyl modified
  modified_base 35: mod_base = OTHER; note = 2'-O-methyl modified
  modified_base 36: mod_base = OTHER; note = 2'-O-methyl modified
  source 1..36: mol_type = other RNA

SEQ ID NO: 810 - RNA, 36 nt, synthetic construct; identical to SEQ ID NO: 780
  misc_feature 1..36: note = synthetic construct
  modified_base 1: mod_base = OTHER; note = 2'-O-methyl modified with phosphodiester linkage to following ribonucleotide
  modified_base 2: mod_base = OTHER; note = 2'-O-methyl modified
  modified_base 3: mod_base = OTHER; note = 2'-fluoro modified
  modified_base 4: mod_base = OTHER; note = 2'-O-methyl modified
  modified_base 5: mod_base = OTHER; note = 2'-O-methyl modified
  modified_base 6: mod_base = OTHER; note = 2'-O-methyl modified
  modified_base 7: mod_base = OTHER; note = 2'-O-methyl modified
  modified_base 8: mod_base = OTHER; note = 2'-fluoro modified
  modified_base 9: mod_base = OTHER; note = 2'-fluoro modified
  modified_base 10: mod_base = OTHER; note = 2'-fluoro modified
  modified_base 11: mod_base = OTHER; note = 2'-O-methyl modified
  modified_base 12: mod_base = OTHER; note = 2'-fluoro modified
  modified_base 13: mod_base = OTHER; note = 2'-fluoro modified
  modified_base 14: mod_base = OTHER; note = 2'-O-methyl modified
  modified_base 15: mod_base = OTHER; note = 2'-O-methyl modified
  modified_base 16: mod_base = OTHER; note = 2'-O-methyl modified
  modified_base 17: mod_base = OTHER; note = 2'-fluoro modified
  modified_base 18: mod_base = OTHER; note = 2'-O-methyl modified
  modified_base 19: mod_base = OTHER; note = 2'-O-methyl modified
  modified_base 20: mod_base = OTHER; note = 2'-O-methyl modified
  modified_base 21: mod_base = OTHER; note = 2'-O-methyl modified
  modified_base 22: mod_base = OTHER; note = 2'-O-methyl modified
  modified_base 23: mod_base = OTHER; note = 2'-O-methyl modified
  modified_base 24: mod_base = OTHER; note = 2'-O-methyl modified
  modified_base 25: mod_base = OTHER; note = 2'-O-methyl modified
  modified_base 26: mod_base = OTHER; note = 2'-O-methyl modified
  modified_base 27: mod_base = OTHER; note = 2'-O-methyl modified
  modified_base 28: mod_base = OTHER; note = GalNAc attached
  modified_base 29: mod_base = OTHER; note = GalNAc attached
  modified_base 30: mod_base = OTHER; note = GalNAc attached
  modified_base 31: mod_base = OTHER; note = 2'-O-methyl modified
  modified_base 32: mod_base = OTHER; note = 2'-O-methyl modified
  modified_base 33: mod_base = OTHER; note = 2'-O-methyl modified
  modified_base 34: mod_base = OTHER; note = 2'-O-methyl modified
  modified_base 35: mod_base = OTHER; note = 2'-O-methyl modified
  modified_base 36: mod_base = OTHER; note = 2'-O-methyl modified
  source 1..36: mol_type = other RNA

SEQ ID NO: 811 - RNA, 36 nt, synthetic construct; identical to SEQ ID NO: 781
  misc_feature 1..36: note = synthetic construct
  modified_base 1: mod_base = OTHER; note = 2'-O-methyl modified with phosphodiester linkage to following ribonucleotide
  modified_base 2: mod_base = OTHER; note = 2'-O-methyl modified
  modified_base 3: mod_base = OTHER; note = 2'-fluoro modified
  modified_base 4: mod_base = OTHER; note = 2'-O-methyl modified
  modified_base 5: mod_base = OTHER; note = 2'-O-methyl modified
  modified_base 6: mod_base = OTHER; note = 2'-O-methyl modified
  modified_base 7: mod_base = OTHER; note = 2'-O-methyl modified
  modified_base 8: mod_base = OTHER; note = 2'-fluoro modified
  modified_base 9: mod_base = OTHER; note = 2'-fluoro modified
  modified_base 10: mod_base = OTHER; note = 2'-fluoro modified
  modified_base 11: mod_base = OTHER; note = 2'-O-methyl modified
  modified_base 12: mod_base = OTHER; note = 2'-fluoro modified
  modified_base 13: mod_base = OTHER; note = 2'-fluoro modified
  modified_base 14: mod_base = OTHER; note = 2'-O-methyl modified
  modified_base 15: mod_base = OTHER; note = 2'-O-methyl modified
  modified_base 16: mod_base = OTHER; note = 2'-O-methyl modified
  modified_base 17: mod_base = OTHER; note = 2'-fluoro modified
  modified_base 18: mod_base = OTHER; note = 2'-O-methyl modified
  modified_base 19: mod_base = OTHER; note = 2'-O-methyl modified
  modified_base 20: mod_base = OTHER; note = 2'-O-methyl modified
  modified_base 21: mod_base = OTHER; note = 2'-O-methyl modified
  modified_base 22: mod_base = OTHER; note = 2'-O-methyl modified
  modified_base 23: mod_base = OTHER; note = 2'-O-methyl modified
  modified_base 24: mod_base = OTHER; note = 2'-O-methyl modified
  modified_base 25: mod_base = OTHER; note = 2'-O-methyl modified
  modified_base 26: mod_base = OTHER; note = 2'-O-methyl modified
  modified_base 27: mod_base = OTHER; note = 2'-O-methyl modified
  modified_base 28: mod_base = OTHER; note = GalNAc attached
  modified_base 29: mod_base = OTHER; note = GalNAc attached
  modified_base 30: mod_base = OTHER; note = GalNAc attached
  modified_base 31: mod_base = OTHER; note = 2'-O-methyl modified
  modified_base 32: mod_base = OTHER; note = 2'-O-methyl modified
  modified_base 33: mod_base = OTHER; note = 2'-O-methyl modified
  modified_base 34: mod_base = OTHER; note = 2'-O-methyl modified
  modified_base 35: mod_base = OTHER; note = 2'-O-methyl modified
  modified_base 36: mod_base = OTHER; note = 2'-O-methyl modified
  source 1..36: mol_type = other RNA

SEQ ID NO: 812 - RNA, 36 nt, synthetic construct; identical to SEQ ID NO: 782
  misc_feature 1..36: note = synthetic construct
  modified_base 1: mod_base = OTHER; note = 2'-O-methyl modified with phosphodiester linkage to following ribonucleotide
  modified_base 2: mod_base = OTHER; note = 2'-O-methyl modified
  modified_base 3: mod_base = OTHER; note = 2'-fluoro modified
  modified_base 4: mod_base = OTHER; note = 2'-O-methyl modified
  modified_base 5: mod_base = OTHER; note = 2'-O-methyl modified
  modified_base 6: mod_base = OTHER; note = 2'-O-methyl modified
  modified_base 7: mod_base = OTHER; note = 2'-O-methyl modified
  modified_base 8: mod_base = OTHER; note = 2'-fluoro modified
  modified_base 9: mod_base = OTHER; note = 2'-fluoro modified
  modified_base 10: mod_base = OTHER; note = 2'-fluoro modified
  modified_base 11: mod_base = OTHER; note = 2'-O-methyl modified
  modified_base 12: mod_base = OTHER; note = 2'-fluoro modified
  modified_base 13: mod_base = OTHER; note = 2'-fluoro modified
  modified_base 14: mod_base = OTHER; note = 2'-O-methyl modified
  modified_base 15: mod_base = OTHER; note = 2'-O-methyl modified
  modified_base 16: mod_base = OTHER; note = 2'-O-methyl modified
  modified_base 17: mod_base = OTHER; note = 2'-fluoro modified
  modified_base 18: mod_base = OTHER; note = 2'-O-methyl modified
  modified_base 19: mod_base = OTHER; note = 2'-O-methyl modified
  modified_base 20: mod_base = OTHER; note = 2'-O-methyl modified
  modified_base 21: mod_base = OTHER; note = 2'-O-methyl modified
  modified_base 22: mod_base = OTHER; note = 2'-O-methyl modified
  modified_base 23: mod_base = OTHER; note = 2'-O-methyl modified
  modified_base 24: mod_base = OTHER; note = 2'-O-methyl modified
  modified_base 25: mod_base = OTHER; note = 2'-O-methyl modified
  modified_base 26: mod_base = OTHER; note = 2'-O-methyl modified
  modified_base 27: mod_base = OTHER; note = 2'-O-methyl modified
  modified_base 28: mod_base = OTHER; note = GalNAc attached
  modified_base 29: mod_base = OTHER; note = GalNAc attached
  modified_base 30: mod_base = OTHER; note = GalNAc attached
  modified_base 31: mod_base = OTHER; note = 2'-O-methyl modified
  modified_base 32: mod_base = OTHER; note = 2'-O-methyl modified
  modified_base 33: mod_base = OTHER; note = 2'-O-methyl modified
  modified_base 34: mod_base = OTHER; note = 2'-O-methyl modified
  modified_base 35: mod_base = OTHER; note = 2'-O-methyl modified
  modified_base 36: mod_base = OTHER; note = 2'-O-methyl modified
  source 1..36: mol_type = other RNA

SEQ ID NO: 813 - RNA, 36 nt, synthetic construct; identical to SEQ ID NO: 783
  misc_feature 1..36: note = synthetic construct
  modified_base 1: mod_base = OTHER; note = 2'-O-methyl modified with phosphodiester linkage to following ribonucleotide
  modified_base 2: mod_base = OTHER; note = 2'-O-methyl modified
  modified_base 3: mod_base = OTHER; note = 2'-fluoro modified
  modified_base 4: mod_base = OTHER; note = 2'-O-methyl modified
  modified_base 5: mod_base = OTHER; note = 2'-O-methyl modified
  modified_base 6: mod_base = OTHER; note = 2'-O-methyl modified
  modified_base 7: mod_base = OTHER; note = 2'-O-methyl modified
  modified_base 8: mod_base = OTHER; note = 2'-fluoro modified
  modified_base 9: mod_base = OTHER; note = 2'-fluoro modified
  modified_base 10: mod_base = OTHER; note = 2'-fluoro modified
  modified_base 11: mod_base = OTHER; note = 2'-O-methyl modified
  modified_base 12: mod_base = OTHER; note = 2'-fluoro modified
  modified_base 13: mod_base = OTHER; note = 2'-fluoro modified
  modified_base 14: mod_base = OTHER; note = 2'-O-methyl modified
  modified_base 15: mod_base = OTHER; note = 2'-O-methyl modified
  modified_base 16: mod_base = OTHER; note = 2'-O-methyl modified
  modified_base 17: mod_base = OTHER; note = 2'-fluoro modified
  modified_base 18: mod_base = OTHER; note = 2'-O-methyl modified
  modified_base 19: mod_base = OTHER; note = 2'-O-methyl modified
  modified_base 20: mod_base = OTHER; note = 2'-O-methyl modified
  modified_base 21: mod_base = OTHER; note = 2'-O-methyl modified
  modified_base 22: mod_base = OTHER; note = 2'-O-methyl modified
  modified_base 23: mod_base = OTHER; note = 2'-O-methyl modified
  modified_base 24: mod_base = OTHER; note = 2'-O-methyl modified
  modified_base 25: mod_base = OTHER; note = 2'-O-methyl modified
  modified_base 26: mod_base = OTHER; note = 2'-O-methyl modified
  modified_base 27: mod_base = OTHER; note = 2'-O-methyl modified
  modified_base 28: mod_base = OTHER; note = GalNAc attached
  modified_base 29: mod_base = OTHER; note = GalNAc attached
  modified_base 30: mod_base = OTHER; note = GalNAc attached
  modified_base 31: mod_base = OTHER; note = 2'-O-methyl modified
  modified_base 32: mod_base = OTHER; note = 2'-O-methyl modified
  modified_base 33: mod_base = OTHER; note = 2'-O-methyl modified
  modified_base 34: mod_base = OTHER; note = 2'-O-methyl modified
  modified_base 35: mod_base = OTHER; note = 2'-O-methyl modified
  modified_base 36: mod_base = OTHER; note = 2'-O-methyl modified
  source 1..36: mol_type = other RNA

SEQ ID NO: 814 - RNA, 36 nt, synthetic construct
  misc_feature 1..36: note = synthetic construct
  modified_base 1: mod_base = OTHER; note = 2'-O-methyl modified with phosphodiester linkage to following ribonucleotide
  modified_base 2: mod_base = OTHER; note = 2'-O-methyl modified
  modified_base 3: mod_base = OTHER; note = 2'-fluoro modified
  modified_base 4: mod_base = OTHER; note = 2'-O-methyl modified
  modified_base 5: mod_base = OTHER; note = 2'-O-methyl modified
  modified_base 6: mod_base = OTHER; note = 2'-O-methyl modified
  modified_base 7: mod_base = OTHER; note = 2'-O-methyl modified
  modified_base 8: mod_base = OTHER; note = 2'-fluoro modified
  modified_base 9: mod_base = OTHER; note = 2'-fluoro modified
  modified_base 10: mod_base = OTHER; note = 2'-fluoro modified
  modified_base 11: mod_base = OTHER; note = 2'-O-methyl modified
  modified_base 12: mod_base = OTHER; note = 2'-fluoro modified
  modified_base 13: mod_base = OTHER; note = 2'-fluoro modified
  modified_base 14: mod_base = OTHER; note = 2'-O-methyl modified
  modified_base 15: mod_base = OTHER; note = 2'-O-methyl modified
  modified_base 16: mod_base = OTHER; note = 2'-O-methyl modified
  modified_base 17: mod_base = OTHER; note = 2'-fluoro modified
  modified_base 18: mod_base = OTHER; note = 2'-O-methyl modified
  modified_base 19: mod_base = OTHER; note = 2'-O-methyl modified
  modified_base 20: mod_base = OTHER; note = 2'-O-methyl modified
  modified_base 21: mod_base = OTHER; note = 2'-O-methyl modified
  modified_base 22: mod_base = OTHER; note = 2'-O-methyl modified
  modified_base 23: mod_base = OTHER; note = 2'-O-methyl modified
  modified_base 24: mod_base = OTHER; note = 2'-O-methyl modified
  modified_base 25: mod_base = OTHER; note = 2'-O-methyl modified
  modified_base 26: mod_base = OTHER; note = 2'-O-methyl modified
  modified_base 27: mod_base = OTHER; note = 2'-O-methyl modified
  modified_base 28: mod_base = OTHER; note = GalNAc attached
  modified_base 29: mod_base = OTHER; note = GalNAc attached
  modified_base 30: mod_base = OTHER; note = GalNAc attached
  modified_base 31: mod_base = OTHER; note = 2'-O-methyl modified
  modified_base 32: mod_base = OTHER; note = 2'-O-methyl modified
  modified_base 33: mod_base = OTHER; note = 2'-O-methyl modified
  modified_base 34: mod_base = OTHER; note = 2'-O-methyl modified
  modified_base 35: mod_base = OTHER; note = 2'-O-methyl modified
  modified_base 36: mod_base = OTHER; note = 2'-O-methyl modified
  source 1..36: mol_type = other RNA
ggtgtttgtcagcaaagatagcagccgaaaggctgc

SEQ ID NO: 815 - RNA, 36 nt, synthetic construct; identical to SEQ ID NO: 785
  misc_feature 1..36: note = synthetic construct
  modified_base 1: mod_base = OTHER; note = 2'-O-methyl modified with phosphodiester linkage to following ribonucleotide
  modified_base 2: mod_base = OTHER; note = 2'-O-methyl modified
  modified_base 3: mod_base = OTHER; note = 2'-fluoro modified
  modified_base 4: mod_base = OTHER; note = 2'-O-methyl modified
  modified_base 5: mod_base = OTHER; note = 2'-O-methyl modified
  modified_base 6: mod_base = OTHER; note = 2'-O-methyl modified
  modified_base 7: mod_base = OTHER; note = 2'-O-methyl modified
  modified_base 8: mod_base = OTHER; note = 2'-fluoro modified
  modified_base 9: mod_base = OTHER; note = 2'-fluoro modified
  modified_base 10: mod_base = OTHER; note = 2'-fluoro modified
  modified_base 11: mod_base = OTHER; note = 2'-O-methyl modified
  modified_base 12: mod_base = OTHER; note = 2'-fluoro modified
  modified_base 13: mod_base = OTHER; note = 2'-fluoro modified
  modified_base 14: mod_base = OTHER; note = 2'-O-methyl modified
  modified_base 15: mod_base = OTHER; note = 2'-O-methyl modified
  modified_base 16: mod_base = OTHER; note = 2'-O-methyl modified
  modified_base 17: mod_base = OTHER; note = 2'-fluoro modified
  modified_base 18: mod_base = OTHER; note = 2'-O-methyl modified
  modified_base 19: mod_base = OTHER; note = 2'-O-methyl modified
  modified_base 20: mod_base = OTHER; note = 2'-O-methyl modified
  modified_base 21: mod_base = OTHER; note = 2'-O-methyl modified
  modified_base 22: mod_base = OTHER; note = 2'-O-methyl modified
  modified_base 23: mod_base = OTHER; note = 2'-O-methyl modified
  modified_base 24: mod_base = OTHER; note = 2'-O-methyl modified
  modified_base 25: mod_base = OTHER; note = 2'-O-methyl modified
  modified_base 26: mod_base = OTHER; note = 2'-O-methyl modified
  modified_base 27: mod_base = OTHER; note = 2'-O-methyl modified
  modified_base 28: mod_base = OTHER; note = GalNAc attached
  modified_base 29: mod_base = OTHER; note = GalNAc attached
  modified_base 30: mod_base = OTHER; note = GalNAc attached
  modified_base 31: mod_base = OTHER; note = 2'-O-methyl modified
  modified_base 32: mod_base = OTHER; note = 2'-O-methyl modified
  modified_base 33: mod_base = OTHER; note = 2'-O-methyl modified
  modified_base 34: mod_base = OTHER; note = 2'-O-methyl modified
  modified_base 35: mod_base = OTHER; note = 2'-O-methyl modified
  modified_base 36: mod_base = OTHER; note = 2'-O-methyl modified
  source 1..36: mol_type = other RNA

SEQ ID NO: 816 - RNA, 36 nt, synthetic construct; identical to SEQ ID NO: 787
  misc_feature 1..36: note = synthetic construct
  modified_base 1: mod_base = OTHER; note = 2'-O-methyl modified with phosphodiester linkage to following ribonucleotide
  modified_base 2: mod_base = OTHER; note = 2'-O-methyl modified
  modified_base 3: mod_base = OTHER; note = 2'-fluoro modified
  modified_base 4: mod_base = OTHER; note = 2'-O-methyl modified
  modified_base 5: mod_base = OTHER; note = 2'-O-methyl modified
  modified_base 6: mod_base = OTHER; note = 2'-O-methyl modified
  modified_base 7: mod_base = OTHER; note = 2'-O-methyl modified
  modified_base 8: mod_base = OTHER; note = 2'-fluoro modified
  modified_base 9: mod_base = OTHER; note = 2'-fluoro modified
  modified_base 10: mod_base = OTHER; note = 2'-fluoro modified
  modified_base 11: mod_base = OTHER; note = 2'-O-methyl modified
  modified_base 12: mod_base = OTHER; note = 2'-fluoro modified
  modified_base 13: mod_base = OTHER; note = 2'-fluoro modified
  modified_base 14: mod_base = OTHER; note = 2'-O-methyl modified
  modified_base 15: mod_base = OTHER; note = 2'-O-methyl modified
  modified_base 16: mod_base = OTHER; note = 2'-O-methyl modified
  modified_base 17: mod_base = OTHER; note = 2'-fluoro modified
  modified_base 18: mod_base = OTHER; note = 2'-O-methyl modified
  modified_base 19: mod_base = OTHER; note = 2'-O-methyl modified
  modified_base 20: mod_base = OTHER; note = 2'-O-methyl modified
  modified_base 21: mod_base = OTHER; note = 2'-O-methyl modified
  modified_base 22: mod_base = OTHER; note = 2'-O-methyl modified
  modified_base 23: mod_base = OTHER; note = 2'-O-methyl modified
  modified_base 24: mod_base = OTHER; note = 2'-O-methyl modified
  modified_base 25: mod_base = OTHER; note = 2'-O-methyl modified
  modified_base 26: mod_base = OTHER; note = 2'-O-methyl modified
  modified_base 27: mod_base = OTHER; note = 2'-O-methyl modified
  modified_base 28: mod_base = OTHER; note = GalNAc attached
  modified_base 29: mod_base = OTHER; note = GalNAc attached
  modified_base 30: mod_base = OTHER; note = GalNAc attached
  modified_base 31: mod_base = OTHER; note = 2'-O-methyl modified
  modified_base 32: mod_base = OTHER; note = 2'-O-methyl modified
  modified_base 33: mod_base = OTHER; note = 2'-O-methyl modified
  modified_base 34: mod_base = OTHER; note = 2'-O-methyl modified
  modified_base 35: mod_base = OTHER; note = 2'-O-methyl modified
  modified_base 36: mod_base = OTHER; note = 2'-O-methyl modified
  source 1..36: mol_type = other RNA

SEQ ID NO: 817 - RNA, 36 nt, synthetic construct; identical to SEQ ID NO: 788
  misc_feature 1..36: note = synthetic construct
  modified_base 1: mod_base = OTHER; note = 2'-O-methyl modified with phosphodiester linkage to following ribonucleotide
  modified_base 2: mod_base = OTHER; note = 2'-O-methyl modified
  modified_base 3: mod_base = OTHER; note = 2'-fluoro modified
  modified_base 4: mod_base = OTHER; note = 2'-O-methyl modified
  modified_base 5: mod_base = OTHER; note = 2'-O-methyl modified
  modified_base 6: mod_base = OTHER; note = 2'-O-methyl modified
  modified_base 7: mod_base = OTHER; note = 2'-O-methyl modified
  modified_base 8: mod_base = OTHER; note = 2'-fluoro modified
  modified_base 9: mod_base = OTHER; note = 2'-fluoro modified
  modified_base 10: mod_base = OTHER; note = 2'-fluoro modified
  modified_base 11: mod_base = OTHER; note = 2'-O-methyl modified
  modified_base 12: mod_base = OTHER; note = 2'-fluoro modified
  modified_base 13: mod_base = OTHER; note = 2'-fluoro modified
  modified_base 14: mod_base = OTHER; note = 2'-O-methyl modified
  modified_base 15: mod_base = OTHER; note = 2'-O-methyl modified
  modified_base 16: mod_base = OTHER; note = 2'-O-methyl modified
  modified_base 17: mod_base = OTHER; note = 2'-fluoro modified
  modified_base 18: mod_base = OTHER; note = 2'-O-methyl modified
  modified_base 19: mod_base = OTHER; note = 2'-O-methyl modified
  modified_base 20: mod_base = OTHER; note = 2'-O-methyl modified
  modified_base 21: mod_base = OTHER; note = 2'-O-methyl modified
  modified_base 22: mod_base = OTHER; note = 2'-O-methyl modified
  modified_base 23: mod_base = OTHER; note = 2'-O-methyl modified
  modified_base 24: mod_base = OTHER; note = 2'-O-methyl modified
  modified_base 25: mod_base = OTHER; note = 2'-O-methyl modified
  modified_base 26: mod_base = OTHER; note = 2'-O-methyl modified
  modified_base 27: mod_base = OTHER; note = 2'-O-methyl modified
  modified_base 28: mod_base = OTHER; note = GalNAc attached
  modified_base 29: mod_base = OTHER; note = GalNAc attached
  modified_base 30: mod_base = OTHER; note = GalNAc attached
  modified_base 31: mod_base = OTHER; note = 2'-O-methyl modified
  modified_base 32: mod_base = OTHER; note = 2'-O-methyl modified
  modified_base 33: mod_base = OTHER; note = 2'-O-methyl modified
  modified_base 34: mod_base = OTHER; note = 2'-O-methyl modified
  modified_base 35: mod_base = OTHER; note = 2'-O-methyl modified
  modified_base 36: mod_base = OTHER; note = 2'-O-methyl modified
  source 1..36: mol_type = other RNA

SEQ ID NO: 818 - RNA, 36 nt, synthetic construct; identical to SEQ ID NO: 804
  misc_feature 1..36: note = synthetic construct
  modified_base 1: mod_base = OTHER; note = 2'-O-methyl modified with phosphodiester linkage to following ribonucleotide
  modified_base 2: mod_base = OTHER; note = 2'-O-methyl modified
  modified_base 3: mod_base = OTHER; note = 2'-fluoro modified
  modified_base 4: mod_base = OTHER; note = 2'-O-methyl modified
  modified_base 5: mod_base = OTHER; note = 2'-O-methyl modified
  modified_base 6: mod_base = OTHER; note = 2'-O-methyl modified
  modified_base 7: mod_base = OTHER; note = 2'-O-methyl modified
  modified_base 8: mod_base = OTHER; note = 2'-fluoro modified
  modified_base 9: mod_base = OTHER; note = 2'-fluoro modified
  modified_base 10: mod_base = OTHER; note = 2'-fluoro modified
  modified_base 11: mod_base = OTHER; note = 2'-O-methyl modified
  modified_base 12: mod_base = OTHER; note = 2'-fluoro modified
  modified_base 13: mod_base = OTHER; note = 2'-fluoro modified
  modified_base 14: mod_base = OTHER; note = 2'-O-methyl modified
  modified_base 15: mod_base = OTHER; note = 2'-O-methyl modified
  modified_base 16: mod_base = OTHER; note = 2'-O-methyl modified
  modified_base 17: mod_base = OTHER; note = 2'-fluoro modified
  modified_base 18: mod_base = OTHER; note = 2'-O-methyl modified
  modified_base 19: mod_base = OTHER; note = 2'-O-methyl modified
  modified_base 20: mod_base = OTHER; note = 2'-O-methyl modified
  modified_base 21: mod_base = OTHER; note = 2'-O-methyl modified
  modified_base 22: mod_base = OTHER; note = 2'-O-methyl modified
  modified_base 23: mod_base = OTHER; note = 2'-O-methyl modified
  modified_base 24: mod_base = OTHER; note = 2'-O-methyl modified
  modified_base 25: mod_base = OTHER; note = 2'-O-methyl modified
  modified_base 26: mod_base = OTHER; note = 2'-O-methyl modified
  modified_base 27: mod_base = OTHER; note = 2'-O-methyl modified
  modified_base 28: mod_base = OTHER; note = GalNAc attached
  modified_base 29: mod_base = OTHER; note = GalNAc attached
  modified_base 30: mod_base = OTHER; note = GalNAc attached
  modified_base 31: mod_base = OTHER; note = 2'-O-methyl modified
  modified_base 32: mod_base = OTHER; note = 2'-O-methyl modified
  modified_base 33: mod_base = OTHER; note = 2'-O-methyl modified
  modified_base 34: mod_base = OTHER; note = 2'-O-methyl modified
  modified_base 35: mod_base = OTHER; note = 2'-O-methyl modified
  modified_base 36: mod_base = OTHER; note = 2'-O-methyl modified
  source 1..36: mol_type = other RNA

SEQ ID NO: 819 - RNA, 22 nt, synthetic construct
  misc_feature 1..22: note = synthetic construct
  modified_base 1: mod_base = OTHER; note = 5'-methoxyphosphonate-4'-oxy modified
  modified_base 2: mod_base = OTHER; note = 2'-fluoro modified with phosphodiester linkage to following ribonucleotide
  modified_base 3: mod_base = OTHER; note = 2'-fluoro modified with phosphodiester linkage to following ribonucleotide
  modified_base 4: mod_base = OTHER; note = 2'-fluoro modified
  modified_base 5: mod_base = OTHER; note = 2'-fluoro modified
  modified_base 6: mod_base = OTHER; note = 2'-O-methyl modified
  modified_base 7: mod_base = OTHER; note = 2'-fluoro modified
  modified_base 8: mod_base = OTHER; note = 2'-O-methyl modified
  modified_base 9: mod_base = OTHER; note = 2'-O-methyl modified
  modified_base 10: mod_base = OTHER; note = 2'-fluoro modified
  modified_base 11: mod_base = OTHER; note = 2'-O-methyl modified
  modified_base 12: mod_base = OTHER; note = 2'-O-methyl modified
  modified_base 13: mod_base = OTHER; note = 2'-O-methyl modified
  modified_base 14: mod_base = OTHER; note = 2'-fluoro modified
  modified_base 15: mod_base = OTHER; note = 2'-O-methyl modified
  modified_base 16: mod_base = OTHER; note = 2'-O-methyl modified
  modified_base 17: mod_base = OTHER; note = 2'-O-methyl modified
  modified_base 18: mod_base = OTHER; note = 2'-O-methyl modified
  modified_base 19: mod_base = OTHER; note = 2'-O-methyl modified
  modified_base 20: mod_base = OTHER; note = 2'-O-methyl modified with phosphodiester linkage to following ribonucleotide
  modified_base 21: mod_base = OTHER; note = 2'-O-methyl modified with phosphodiester linkage to following ribonucleotide
  modified_base 22: mod_base = OTHER; note = 2'-O-methyl modified
  source 1..22: mol_type = other RNA
ttctgcttctcttccatgaggg

SEQ ID NO: 820 - RNA, 22 nt, synthetic construct
  misc_feature 1..22: note = synthetic construct
  modified_base 1: mod_base = OTHER; note = 5'-methoxyphosphonate-4'-oxy modified
  modified_base 2: mod_base = OTHER; note = 2'-fluoro modified with phosphodiester linkage to following ribonucleotide
  modified_base 3: mod_base = OTHER; note = 2'-fluoro modified
  modified_base 4: mod_base = OTHER; note = 2'-fluoro modified
  modified_base 5: mod_base = OTHER; note = 2'-fluoro modified
  modified_base 6: mod_base = OTHER; note = 2'-O-methyl modified
  modified_base 7: mod_base = OTHER; note = 2'-fluoro modified
  modified_base 8: mod_base = OTHER; note = 2'-O-methyl modified
  modified_base 9: mod_base = OTHER; note = 2'-O-methyl modified
  modified_base 10: mod_base = OTHER; note = 2'-fluoro modified
  modified_base 11: mod_base = OTHER; note = 2'-O-methyl modified
  modified_base 12: mod_base = OTHER; note = 2'-O-methyl modified
  modified_base 13: mod_base = OTHER; note = 2'-O-methyl modified
  modified_base 14: mod_base = OTHER; note = 2'-fluoro modified
  modified_base 15: mod_base = OTHER; note = 2'-O-methyl modified
  modified_base 16: mod_base = OTHER; note = 2'-O-methyl modified
  modified_base 17: mod_base = OTHER; note = 2'-O-methyl modified
  modified_base 18: mod_base = OTHER; note = 2'-O-methyl modified
  modified_base 19: mod_base = OTHER; note = 2'-O-methyl modified
  modified_base 20: mod_base = OTHER; note = 2'-O-methyl modified with phosphodiester linkage to following ribonucleotide
  modified_base 21: mod_base = OTHER; note = 2'-O-methyl modified with phosphodiester linkage to following ribonucleotide
  modified_base 22: mod_base = OTHER; note = 2'-O-methyl modified
  source 1..22: mol_type = other RNA
tacaggatctgcttctcttcgg

SEQ ID NO: 821 - RNA, 22 nt, synthetic construct
  misc_feature 1..22: note = synthetic construct
  modified_base 1: mod_base = OTHER; note = 5'-methoxyphosphonate-4'-oxy modified
  modified_base 2: mod_base = OTHER; note = 2'-fluoro modified with phosphodiester linkage to following ribonucleotide
  modified_base 3: mod_base = OTHER; note = 2'-fluoro modified
  modified_base 4: mod_base = OTHER; note = 2'-fluoro modified
  modified_base 5: mod_base = OTHER; note = 2'-fluoro modified
  modified_base 6: mod_base = OTHER; note = 2'-O-methyl modified
  modified_base 7: mod_base = OTHER; note = 2'-fluoro modified
  modified_base 8: mod_base = OTHER; note = 2'-O-methyl modified
  modified_base 9: mod_base = OTHER; note = 2'-O-methyl modified
  modified_base 10: mod_base = OTHER; note = 2'-fluoro modified
  modified_base 11: mod_base = OTHER; note = 2'-O-methyl modified
  modified_base 12: mod_base = OTHER; note = 2'-O-methyl modified
  modified_base 13: mod_base = OTHER; note = 2'-O-methyl modified
  modified_base 14: mod_base = OTHER; note = 2'-fluoro modified
  modified_base 15: mod_base = OTHER; note = 2'-O-methyl modified
  modified_base 16: mod_base = OTHER; note = 2'-O-methyl modified
  modified_base 17: mod_base = OTHER; note = 2'-O-methyl modified
  modified_base 18: mod_base = OTHER; note = 2'-O-methyl modified
  modified_base 19: mod_base = OTHER; note = 2'-O-methyl modified
  modified_base 20: mod_base = OTHER; note = 2'-O-methyl modified with phosphodiester linkage to following ribonucleotide
  modified_base 21: mod_base = OTHER; note = 2'-O-methyl modified with phosphodiester linkage to following ribonucleotide
  modified_base 22: mod_base = OTHER; note = 2'-O-methyl modified
  source 1..22: mol_type = other RNA
tagcacaatggtacggttgcgg

SEQ ID NO: 822 - RNA, 22 nt, synthetic construct
  misc_feature 1..22: note = synthetic construct
  modified_base 1: mod_base = OTHER; note = 5'-methoxyphosphonate-4'-oxy modified
  modified_base 2: mod_base = OTHER; note = 2'-fluoro modified with phosphodiester linkage to following ribonucleotide
  modified_base 3: mod_base = OTHER; note = 2'-fluoro modified with phosphodiester linkage to following ribonucleotide
  modified_base 4: mod_base = OTHER; note = 2'-fluoro modified
  modified_base 5: mod_base = OTHER; note = 2'-fluoro modified
  modified_base 6: mod_base = OTHER; note = 2'-O-methyl modified
  modified_base 7: mod_base = OTHER; note = 2'-fluoro modified
  modified_base 8: mod_base = OTHER; note = 2'-O-methyl modified
  modified_base 9: mod_base = OTHER; note = 2'-O-methyl modified
  modified_base 10: mod_base = OTHER; note = 2'-fluoro modified
  modified_base 11: mod_base = OTHER; note = 2'-O-methyl modified
  modified_base 12: mod_base = OTHER; note = 2'-O-methyl modified
  modified_base 13: mod_base = OTHER; note = 2'-O-methyl modified
  modified_base 14: mod_base = OTHER; note = 2'-fluoro modified
  modified_base 15: mod_base = OTHER; note = 2'-O-methyl modified
  modified_base 16: mod_base = OTHER; note = 2'-O-methyl modified
  modified_base 17: mod_base = OTHER; note = 2'-O-methyl modified
  modified_base 18: mod_base = OTHER; note = 2'-O-methyl modified
  modified_base 19: mod_base = OTHER; note = 2'-O-methyl modified
  modified_base 20: mod_base = OTHER; note = 2'-O-methyl modified with phosphodiester linkage to following ribonucleotide
  modified_base 21: mod_base = OTHER; note = 2'-O-methyl modified with phosphodiester linkage to following ribonucleotide
  modified_base 22: mod_base = OTHER; note = 2'-O-methyl modified
  source 1..22: mol_type = other RNA
tagcagacacatctggcagggg

SEQ ID NO: 823 - RNA, 22 nt, synthetic construct
  misc_feature 1..22: note = synthetic construct
  modified_base 1: mod_base = OTHER; note = 5'-methoxyphosphonate-4'-oxy modified
  modified_base 2: mod_base = OTHER; note = 2'-fluoro modified with phosphodiester linkage to following ribonucleotide
  modified_base 3: mod_base = OTHER; note = 2'-fluoro modified with phosphodiester linkage to following ribonucleotide
  modified_base 4: mod_base = OTHER; note = 2'-fluoro modified
  modified_base 5: mod_base = OTHER; note = 2'-fluoro modified
  modified_base 6: mod_base = OTHER; note = 2'-O-methyl modified
  modified_base 7: mod_base = OTHER; note = 2'-fluoro modified
  modified_base 8: mod_base = OTHER; note = 2'-O-methyl modified
  modified_base 9: mod_base = OTHER; note = 2'-O-methyl modified
  modified_base 10: mod_base = OTHER; note = 2'-fluoro modified
  modified_base 11: mod_base = OTHER; note = 2'-O-methyl modified
  modified_base 12: mod_base = OTHER; note = 2'-O-methyl modified
  modified_base 13: mod_base = OTHER; note = 2'-O-methyl modified
  modified_base 14: mod_base = OTHER; note = 2'-fluoro modified
  modified_base 15: mod_base = OTHER; note = 2'-O-methyl modified
  modified_base 16: mod_base = OTHER; note = 2'-O-methyl modified
  modified_base 17: mod_base = OTHER; note = 2'-O-methyl modified
  modified_base 18: mod_base = OTHER; note = 2'-O-methyl modified
  modified_base 19: mod_base = OTHER; note = 2'-O-methyl modified
  modified_base 20: mod_base = OTHER; note = 2'-O-methyl modified with phosphodiester linkage to following ribonucleotide
  modified_base 21: mod_base = OTHER; note = 2'-O-methyl modified with phosphodiester linkage to following ribonucleotide
  modified_base 22: mod_base = OTHER; note = 2'-O-methyl modified
  source 1..22: mol_type = other RNA
ttagcagacacatctggcaggg

SEQ ID NO: 824 - RNA, 22 nt, synthetic construct
  misc_feature 1..22: note = synthetic construct
  modified_base 1: mod_base = OTHER; note = 5'-methoxyphosphonate-4'-oxy modified
  modified_base 2: mod_base = OTHER; note = 2'-fluoro modified with phosphodiester linkage to following ribonucleotide
  modified_base 3: mod_base = OTHER; note = 2'-fluoro modified with phosphodiester linkage to following ribonucleotide
  modified_base 4: mod_base = OTHER; note = 2'-fluoro modified
  modified_base 5: mod_base = OTHER; note = 2'-fluoro modified
  modified_base 6: mod_base = OTHER; note = 2'-O-methyl modified
  modified_base 7: mod_base = OTHER; note = 2'-fluoro modified
  modified_base 8: mod_base = OTHER; note = 2'-O-methyl modified
  modified_base 9: mod_base = OTHER; note = 2'-O-methyl modified
  modified_base 10: mod_base = OTHER; note = 2'-fluoro modified
  modified_base 11: mod_base = OTHER; note = 2'-O-methyl modified
  modified_base 12: mod_base = OTHER; note = 2'-O-methyl modified
  modified_base 13: mod_base = OTHER; note = 2'-O-methyl modified
  modified_base 14: mod_base = OTHER; note = 2'-fluoro modified
  modified_base 15: mod_base = OTHER; note = 2'-O-methyl modified
  modified_base 16: mod_base = OTHER; note = 2'-O-methyl modified
  modified_base 17: mod_base = OTHER; note = 2'-O-methyl modified
  modified_base 18: mod_base = OTHER; note = 2'-O-methyl modified
  modified_base 19: mod_base = OTHER; note = 2'-O-methyl modified
  modified_base 20: mod_base = OTHER; note = 2'-O-methyl modified with phosphodiester linkage to following ribonucleotide
  modified_base 21: mod_base = OTHER; note = 2'-O-methyl modified with phosphodiester linkage to following ribonucleotide
  modified_base 22: mod_base = OTHER; note = 2'-O-methyl modified
  source 1..22: mol_type = other RNA
ttctgtagcagacacatctggg

SEQ ID NO: 825 - RNA, 22 nt, synthetic construct
  misc_feature 1..22: note = synthetic construct
  modified_base 1: mod_base = OTHER; note = 5'-methoxyphosphonate-4'-oxy modified
  modified_base 2: mod_base = OTHER; note = 2'-fluoro modified with phosphodiester linkage to following ribonucleotide
  modified_base 3: mod_base = OTHER; note = 2'-fluoro modified with phosphodiester linkage to following ribonucleotide
  modified_base 4: mod_base = OTHER; note = 2'-fluoro modified
  modified_base 5: mod_base = OTHER; note = 2'-fluoro modified
  modified_base 6: mod_base = OTHER; note = 2'-O-methyl modified
  modified_base 7: mod_base = OTHER; note = 2'-fluoro modified
  modified_base 8: mod_base = OTHER; note = 2'-O-methyl modified
  modified_base 9: mod_base = OTHER; note = 2'-O-methyl modified
  modified_base 10: mod_base = OTHER; note = 2'-fluoro modified
  modified_base 11: mod_base = OTHER; note = 2'-O-methyl modified
  modified_base 12: mod_base = OTHER; note = 2'-O-methyl modified
  modified_base 13: mod_base = OTHER; note = 2'-O-methyl modified
  modified_base 14: mod_base = OTHER; note = 2'-fluoro modified
  modified_base 15: mod_base = OTHER; note = 2'-O-methyl modified
  modified_base 16: mod_base = OTHER; note = 2'-O-methyl modified
  modified_base 17: mod_base = OTHER; note = 2'-O-methyl modified
  modified_base 18: mod_base = OTHER; note = 2'-O-methyl modified
  modified_base 19: mod_base = OTHER; note = 2'-O-methyl modified
  modified_base 20: mod_base = OTHER; note = 2'-O-methyl modified with phosphodiester linkage to following ribonucleotide
  modified_base 21: mod_base = OTHER; note = 2'-O-methyl modified with phosphodiester linkage to following ribonucleotide
  modified_base 22: mod_base = OTHER; note = 2'-O-methyl modified
  source 1..22: mol_type = other RNA
tgatcaaccttctcaaagtcgg

SEQ ID NO: 826 - RNA, 22 nt, synthetic construct
  misc_feature 1..22: note = synthetic construct
  modified_base 1: mod_base = OTHER; note = 5'-methoxyphosphonate-4'-oxy modified
  modified_base 2: mod_base = OTHER; note = 2'-fluoro modified with phosphodiester linkage to following ribonucleotide
  modified_base 3: mod_base = OTHER; note = 2'-fluoro modified with phosphodiester linkage to following ribonucleotide
  modified_base 4: mod_base = OTHER; note = 2'-fluoro modified
  modified_base 5: mod_base = OTHER; note = 2'-fluoro modified
  modified_base 6: mod_base = OTHER; note = 2'-O-methyl modified
  modified_base 7: mod_base = OTHER; note = 2'-fluoro modified
  modified_base 8: mod_base = OTHER; note = 2'-O-methyl modified
  modified_base 9: mod_base = OTHER; note = 2'-O-methyl modified
  modified_base 10: mod_base = OTHER; note = 2'-fluoro modified
  modified_base 11: mod_base = OTHER; note = 2'-O-methyl modified
  modified_base 12: mod_base = OTHER; note = 2'-O-methyl modified
  modified_base 13: mod_base = OTHER; note = 2'-O-methyl modified
  modified_base 14: mod_base = OTHER; note = 2'-fluoro modified
  modified_base 15: mod_base = OTHER; note = 2'-O-methyl modified
  modified_base 16: mod_base = OTHER; note = 2'-O-methyl modified
  modified_base 17: mod_base = OTHER; note = 2'-O-methyl modified
  modified_base 18: mod_base = OTHER; note = 2'-O-methyl modified
  modified_base 19: mod_base = OTHER; note = 2'-O-methyl modified
  modified_base 20: mod_base = OTHER; note = 2'-O-methyl modified with phosphodiester linkage to following ribonucleotide
  modified_base 21: mod_base = OTHER; note = 2'-O-methyl modified with phosphodiester linkage to following ribonucleotide
  modified_base 22: mod_base = OTHER; note = 2'-O-methyl modified
  source 1..22: mol_type = other RNA
tagatcaaccttctcaaagtgg

SEQ ID NO: 827 - RNA, 22 nt, synthetic construct
  misc_feature 1..22: note = synthetic construct
  modified_base 1: mod_base = OTHER; note = 5'-methoxyphosphonate-4'-oxy modified
  modified_base 2: mod_base = OTHER; note = 2'-fluoro modified with phosphodiester linkage to following ribonucleotide
  modified_base 3: mod_base = OTHER; note = 2'-fluoro modified with phosphodiester linkage to following ribonucleotide
  modified_base 4: mod_base = OTHER; note = 2'-fluoro modified
  modified_base 5: mod_base = OTHER; note = 2'-fluoro modified
  modified_base 6: mod_base = OTHER; note = 2'-O-methyl modified
  modified_base 7: mod_base = OTHER; note = 2'-fluoro modified
  modified_base 8: mod_base = OTHER; note = 2'-O-methyl modified
  modified_base 9: mod_base = OTHER; note = 2'-O-methyl modified
  modified_base 10: mod_base = OTHER; note = 2'-fluoro modified
  modified_base 11: mod_base = OTHER; note = 2'-O-methyl modified
  modified_base 12: mod_base = OTHER; note = 2'-O-methyl modified
  modified_base 13: mod_base = OTHER; note = 2'-O-methyl modified
  modified_base 14: mod_base = OTHER; note = 2'-fluoro modified
  modified_base 15: mod_base = OTHER; note = 2'-O-methyl modified
  modified_base 16: mod_base = OTHER; note = 2'-O-methyl modified
  modified_base 17: mod_base = OTHER; note = 2'-O-methyl modified
  modified_base 18: mod_base = OTHER; note = 2'-O-methyl modified
  modified_base 19: mod_base = OTHER; note = 2'-O-methyl modified
  modified_base 20: mod_base = OTHER; note = 2'-O-methyl modified with phosphodiester linkage to following ribonucleotide
  modified_base 21: mod_base = OTHER; note = 2'-O-methyl modified with phosphodiester linkage to following ribonucleotide
  modified_base 22: mod_base = OTHER; note = 2'-O-methyl modified
  source 1..22: mol_type = other RNA
ttcagatcaaccttctcaaagg

SEQ ID NO: 828 - RNA, 22 nt, synthetic construct
  misc_feature 1..22: note = synthetic construct
  modified_base 1: mod_base = OTHER; note = 5'-methoxyphosphonate-4'-oxy modified
  modified_base 2: mod_base = OTHER; note = 2'-fluoro modified with phosphodiester linkage to following ribonucleotide
  modified_base 3: mod_base = OTHER; note = 2'-O-methyl modified with phosphodiester linkage to following ribonucleotide
  modified_base 4: mod_base = OTHER; note = 2'-O-methyl modified
  modified_base 5: mod_base = OTHER; note = 2'-fluoro modified
  modified_base 6: mod_base = OTHER; note = 2'-O-methyl modified
  modified_base 7: mod_base = OTHER; note = 2'-fluoro modified
  modified_base 8: mod_base = OTHER; note = 2'-fluoro modified
  modified_base 9: mod_base = OTHER; note = 2'-O-methyl modified
  modified_base 10: mod_base = OTHER; note = 2'-fluoro modified
  modified_base 11: mod_base = OTHER; note = 2'-O-methyl modified
  modified_base 12: mod_base = OTHER; note = 2'-fluoro modified
  modified_base 13: mod_base = OTHER; note = 2'-O-methyl modified
  modified_base 14: mod_base = OTHER; note = 2'-fluoro modified
  modified_base 15: mod_base = OTHER; note = 2'-O-methyl modified
  modified_base 16: mod_base = OTHER; note = 2'-fluoro modified
  modified_base 17: mod_base = OTHER; note = 2'-O-methyl modified
  modified_base 18: mod_base = OTHER; note = 2'-O-methyl modified
  modified_base 19: mod_base = OTHER; note = 2'-fluoro modified
  modified_base 20: mod_base = OTHER; note = 2'-O-methyl modified with phosphodiester linkage to following ribonucleotide
  modified_base 21: mod_base = OTHER; note = 2'-O-methyl modified with phosphodiester linkage to following ribonucleotide
  modified_base 22: mod_base = OTHER; note = 2'-O-methyl modified
  source 1..22: mol_type = other RNA
ttctccgtagccaaacagctgg

SEQ ID NO: 829 - RNA, 22 nt, synthetic construct
  misc_feature 1..22: note = synthetic construct
  modified_base 1: mod_base = OTHER; note = 5'-methoxyphosphonate-4'-oxy modified
  modified_base 2: mod_base = OTHER; note = 2'-fluoro modified with phosphodiester linkage to following ribonucleotide
  modified_base 3: mod_base = OTHER; note = 2'-fluoro modified with phosphodiester linkage to following ribonucleotide
  modified_base 4: mod_base = OTHER; note = 2'-fluoro modified
  modified_base 5: mod_base = OTHER; note = 2'-fluoro modified
  modified_base 6: mod_base = OTHER; note = 2'-O-methyl modified
  modified_base 7: mod_base = OTHER; note = 2'-fluoro modified
  modified_base 8: mod_base = OTHER; note = 2'-O-methyl modified
  modified_base 9: mod_base = OTHER; note = 2'-O-methyl modified
  modified_base 10: mod_base = OTHER; note = 2'-fluoro modified
  modified_base 11: mod_base = OTHER; note = 2'-O-methyl modified
  modified_base 12: mod_base = OTHER; note = 2'-O-methyl modified
  modified_base 13: mod_base = OTHER; note = 2'-O-methyl modified
  modified_base 14: mod_base = OTHER; note = 2'-fluoro modified
  modified_base 15: mod_base = OTHER; note = 2'-O-methyl modified
  modified_base 16: mod_base = OTHER; note = 2'-O-methyl modified
  modified_base 17: mod_base = OTHER; note = 2'-O-methyl modified
  modified_base 18: mod_base = OTHER; note = 2'-O-methyl modified
  modified_base 19: mod_base = OTHER; note = 2'-O-methyl modified
  modified_base 20: mod_base = OTHER; note = 2'-O-methyl modified with phosphodiester linkage to following ribonucleotide
  modified_base 21: mod_base = OTHER; note = 2'-O-methyl modified with phosphodiester linkage to following ribonucleotide
  modified_base 22: mod_base = OTHER; note = 2'-O-methyl modified
  source 1..22: mol_type = other RNA
ttctttgctgacaaacaccagg

SEQ ID NO: 830 - RNA, 22 nt, synthetic construct
  misc_feature 1..22: note = synthetic construct
  modified_base 1: mod_base = OTHER; note = 5'-methoxyphosphonate-4'-oxy modified
  modified_base 2: mod_base = OTHER; note = 2'-fluoro modified with phosphodiester linkage to following ribonucleotide
  modified_base 3: mod_base = OTHER; note = 2'-fluoro modified
  modified_base 4: mod_base = OTHER; note = 2'-fluoro modified
  modified_base 5: mod_base = OTHER; note = 2'-fluoro modified
  modified_base 6: mod_base = OTHER; note = 2'-O-methyl modified
  modified_base 7: mod_base = OTHER; note = 2'-fluoro modified
  modified_base 8: mod_base = OTHER; note = 2'-O-methyl modified
  modified_base 9: mod_base = OTHER; note = 2'-O-methyl modified
  modified_base 10: mod_base = OTHER; note = 2'-fluoro modified
  modified_base 11: mod_base = OTHER; note = 2'-O-methyl modified
  modified_base 12: mod_base = OTHER; note = 2'-O-methyl modified
  modified_base 13: mod_base = OTHER; note = 2'-O-methyl modified
  modified_base 14: mod_base = OTHER; note = 2'-fluoro modified
  modified_base 15: mod_base = OTHER; note = 2'-O-methyl modified
  modified_base 16: mod_base = OTHER; note = 2'-O-methyl modified
  modified_base 17: mod_base = OTHER; note = 2'-O-methyl modified
  modified_base 18: mod_base = OTHER; note = 2'-O-methyl modified
  modified_base 19: mod_base = OTHER; note = 2'-O-methyl modified
  modified_base 20: mod_base = OTHER; note = 2'-O-methyl modified with phosphodiester linkage to following ribonucleotide
  modified_base 21: mod_base = OTHER; note = 2'-O-methyl modified with phosphodiester linkage to following ribonucleotide
  modified_base 22: mod_base = OTHER; note = 2'-O-methyl modified
  source 1..22: mol_type = other RNA
tacatctttgctgacaaacagg

SEQ ID NO: 831 - RNA, 22 nt, synthetic construct
  misc_feature 1..22: note = synthetic construct
  modified_base 1: mod_base = OTHER; note = 5'-methoxyphosphonate-4'-oxy modified
  modified_base 2: mod_base = OTHER; note = 2'-fluoro modified with phosphodiester linkage to following ribonucleotide
  modified_base 3: mod_base = OTHER; note = 2'-fluoro modified with phosphodiester linkage to following ribonucleotide
  modified_base 4: mod_base = OTHER; note = 2'-fluoro modified
  modified_base 5: mod_base = OTHER; note = 2'-fluoro modified
  modified_base 6: mod_base = OTHER; note = 2'-O-methyl modified
  modified_base 7: mod_base = OTHER; note = 2'-fluoro modified
  modified_base 8: mod_base = OTHER; note = 2'-O-methyl modified
  modified_base 9: mod_base = OTHER; note = 2'-O-methyl modified
  modified_base 10: mod_base = OTHER; note = 2'-fluoro modified
  modified_base 11: mod_base = OTHER; note = 2'-O-methyl modified
  modified_base 12: mod_base = OTHER; note = 2'-O-methyl modified
  modified_base 13: mod_base = OTHER; note = 2'-O-methyl modified
  modified_base 14: mod_base = OTHER; note = 2'-fluoro modified
  modified_base 15: mod_base = OTHER; note = 2'-O-methyl modified
  modified_base 16: mod_base = OTHER; note = 2'-O-methyl modified
  modified_base 17: mod_base = OTHER; note = 2'-O-methyl modified
  modified_base 18: mod_base = OTHER; note = 2'-O-methyl modified
  modified_base 19: mod_base = OTHER; note = 2'-O-methyl modified
  modified_base 20: mod_base = OTHER; note = 2'-O-methyl modified with phosphodiester linkage to following ribonucleotide
  modified_base 21: mod_base = OTHER; note = 2'-O-methyl modified with phosphodiester linkage to following ribonucleotide
  modified_base 22: mod_base = OTHER; note = 2'-O-methyl modified
  source 1..22: mol_type = other RNA
taggcattgaaggtgtctccgg

SEQ ID NO: 832 - RNA, 22 nt, synthetic construct
  misc_feature 1..22: note = synthetic construct
  modified_base 1: mod_base = OTHER; note = 5'-methoxyphosphonate-4'-oxy modified
  modified_base 2: mod_base = OTHER; note = 2'-fluoro modified with phosphodiester linkage to following ribonucleotide
  modified_base 3: mod_base = OTHER; note = 2'-fluoro modified with phosphodiester linkage to following ribonucleotide
  modified_base 4: mod_base = OTHER; note = 2'-fluoro modified
  modified_base 5: mod_base = OTHER; note = 2'-fluoro modified
  modified_base 6: mod_base = OTHER; note = 2'-O-methyl modified
  modified_base 7: mod_base = OTHER; note = 2'-fluoro modified
  modified_base 8: mod_base = OTHER; note = 2'-O-methyl modified
  modified_base 9: mod_base = OTHER; note = 2'-O-methyl modified
  modified_base 10: mod_base = OTHER; note = 2'-fluoro modified
  modified_base 11: mod_base = OTHER; note = 2'-O-methyl modified
  modified_base 12: mod_base = OTHER; note = 2'-O-methyl modified
  modified_base 13: mod_base = OTHER; note = 2'-O-methyl modified
  modified_base 14: mod_base = OTHER; note = 2'-fluoro modified
  modified_base 15: mod_base = OTHER; note = 2'-O-methyl modified
  modified_base 16: mod_base = OTHER; note = 2'-O-methyl modified
  modified_base 17: mod_base = OTHER; note = 2'-O-methyl modified
  modified_base 18: mod_base = OTHER; note = 2'-O-methyl modified
  modified_base 19: mod_base = OTHER; note = 2'-O-methyl modified
  modified_base 20: mod_base = OTHER; note = 2'-O-methyl modified with phosphodiester linkage to following ribonucleotide
  modified_base 21: mod_base = OTHER; note = 2'-O-methyl modified with phosphodiester linkage to following ribonucleotide
  modified_base 22: mod_base = OTHER; note = 2'-O-methyl modified
  source 1..22: mol_type = other RNA
tatgacggaggcattgaagggg

SEQ ID NO: 833 - RNA, 22 nt, synthetic construct
  misc_feature 1..22: note = synthetic construct
  modified_base 1: mod_base = OTHER; note = 5'-methoxyphosphonate-4'-oxy modified
  modified_base 2: mod_base = OTHER; note = 2'-fluoro modified with phosphodiester linkage to following ribonucleotide
  modified_base 3: mod_base = OTHER; note = 2'-fluoro modified with phosphodiester linkage to following ribonucleotide
  modified_base 4: mod_base = OTHER; note = 2'-fluoro modified
  modified_base 5: mod_base = OTHER; note = 2'-fluoro modified
  modified_base 6: mod_base = OTHER; note = 2'-O-methyl modified
  modified_base 7: mod_base = OTHER; note = 2'-fluoro modified
  modified_base 8: mod_base = OTHER; note = 2'-O-methyl modified
  modified_base 9: mod_base = OTHER; note = 2'-O-methyl modified
  modified_base 10: mod_base = OTHER; note = 2'-fluoro modified
  modified_base 11: mod_base = OTHER; note = 2'-O-methyl modified
  modified_base 12: mod_base = OTHER; note = 2'-O-methyl modified
  modified_base 13: mod_base = OTHER; note = 2'-O-methyl modified
  modified_base 14: mod_base = OTHER; note = 2'-fluoro modified
  modified_base 15: mod_base = OTHER; note = 2'-O-methyl modified
  modified_base 16: mod_base = OTHER; note = 2'-O-methyl modified
  modified_base 17: mod_base = OTHER; note = 2'-O-methyl modified
  modified_base 18: mod_base = OTHER; note = 2'-O-methyl modified
  modified_base 19: mod_base = OTHER; note = 2'-O-methyl modified
  modified_base 20: mod_base = OTHER; note = 2'-O-methyl modified with phosphodiester linkage to following ribonucleotide
  modified_base 21: mod_base = OTHER; note = 2'-O-methyl modified with phosphodiester linkage to following ribonucleotide
  modified_base 22: mod_base = OTHER; note = 2'-O-methyl modified
  source 1..22: mol_type = other RNA
tagatgacggaggcattgaagg

SEQ ID NO: 834 - RNA, 22 nt, synthetic construct
  misc_feature 1..22: note = synthetic construct
  modified_base 1: mod_base = OTHER; note = 5'-methoxyphosphonate-4'-oxy modified
  modified_base 2: mod_base = OTHER; note = 2'-fluoro modified with phosphodiester linkage to following ribonucleotide
  modified_base 3: mod_base = OTHER; note = 2'-fluoro modified with phosphodiester linkage to following ribonucleotide
  modified_base 4: mod_base = OTHER; note = 2'-fluoro modified
  modified_base 5: mod_base = OTHER; note = 2'-fluoro modified
  modified_base 6: mod_base = OTHER; note = 2'-O-methyl modified
  modified_base 7: mod_base = OTHER; note = 2'-fluoro modified
  modified_base 8: mod_base = OTHER; note = 2'-O-methyl modified
  modified_base 9: mod_base = OTHER; note = 2'-O-methyl modified
  modified_base 10: mod_base = OTHER; note = 2'-fluoro modified
  modified_base 11: mod_base = OTHER; note = 2'-O-methyl modified
  modified_base 12: mod_base = OTHER; note = 2'-O-methyl modified
  modified_base 13: mod_base = OTHER; note = 2'-O-methyl modified
  modified_base 14: mod_base = OTHER; note = 2'-fluoro modified
  modified_base 15: mod_base = OTHER; note = 2'-O-methyl modified
  modified_base 16: mod_base = OTHER; note = 2'-O-methyl modified
  modified_base 17: mod_base = OTHER; note = 2'-O-methyl modified
  modified_base 18: mod_base = OTHER; note = 2'-O-methyl modified
  modified_base 19: mod_base = OTHER; note = 2'-O-methyl modified
  modified_base 20: mod_base = OTHER; note = 2'-O-methyl modified with phosphodiester linkage to following ribonucleotide
  modified_base 21: mod_base = OTHER; note = 2'-O-methyl modified with phosphodiester linkage to following ribonucleotide
  modified_base 22: mod_base = OTHER; note = 2'-O-methyl modified
  source 1..22: mol_type = other RNA
tccctttcctcacacgaccagg

SEQ ID NO: 835 - RNA, 22 nt, synthetic construct
  misc_feature 1..22: note = synthetic construct
  modified_base 1: mod_base = OTHER; note = 5'-methoxyphosphonate-4'-oxy modified
  modified_base 2: mod_base = OTHER; note = 2'-fluoro modified with phosphodiester linkage to following ribonucleotide
  modified_base 3: mod_base = OTHER; note = 2'-fluoro modified with phosphodiester linkage to following ribonucleotide
  modified_base 4: mod_base = OTHER; note = 2'-fluoro modified
  modified_base 5: mod_base = OTHER; note = 2'-fluoro modified
  modified_base 6: mod_base = OTHER; note = 2'-O-methyl modified
  modified_base 7: mod_base = OTHER; note = 2'-fluoro modified
  modified_base 8: mod_base = OTHER; note = 2'-O-methyl modified
  modified_base 9: mod_base = OTHER; note = 2'-O-methyl modified
  modified_base 10: mod_base = OTHER; note = 2'-fluoro modified
  modified_base 11: mod_base = OTHER; note = 2'-O-methyl modified
  modified_base 12: mod_base = OTHER; note = 2'-O-methyl modified
  modified_base 13: mod_base = OTHER; note = 2'-O-methyl modified
  modified_base 14: mod_base = OTHER; note = 2'-fluoro modified
  modified_base 15: mod_base = OTHER; note = 2'-O-methyl modified
  modified_base 16: mod_base = OTHER; note = 2'-O-methyl modified
  modified_base 17: mod_base = OTHER; note = 2'-O-methyl modified
  modified_base 18: mod_base = OTHER; note = 2'-O-methyl modified
  modified_base 19: mod_base = OTHER; note = 2'-O-methyl modified
  modified_base 20: mod_base = OTHER; note = 2'-O-methyl modified with phosphodiester linkage to following ribonucleotide
  modified_base 21: mod_base = OTHER; note = 2'-O-methyl modified with phosphodiester linkage to following ribonucleotide
  modified_base 22: mod_base = OTHER; note = 2'-O-methyl modified
  source 1..22: mol_type = other RNA
tcagcccctttcctcacacggg

SEQ ID NO: 836 - RNA, 22 nt, synthetic construct
  misc_feature 1..22: note = synthetic construct
  modified_base 1: mod_base = OTHER; note = 5'-methoxyphosphonate-4'-oxy modified
  modified_base 2: mod_base = OTHER; note = 2'-fluoro modified with phosphodiester linkage to following ribonucleotide
  modified_base 3: mod_base = OTHER; note = 2'-fluoro modified with phosphodiester linkage to following ribonucleotide
  modified_base 4: mod_base = OTHER; note = 2'-fluoro modified
  modified_base 5: mod_base = OTHER; note = 2'-fluoro modified
  modified_base 6: mod_base = OTHER; note = 2'-O-methyl modified
  modified_base 7: mod_base = OTHER; note = 2'-fluoro modified
  modified_base 8: mod_base = OTHER; note = 2'-O-methyl modified
  modified_base 9: mod_base = OTHER; note = 2'-O-methyl modified
  modified_base 10: mod_base = OTHER; note = 2'-fluoro modified
  modified_base 11: mod_base = OTHER; note = 2'-O-methyl modified
  modified_base 12: mod_base = OTHER; note = 2'-O-methyl modified
  modified_base 13: mod_base = OTHER; note = 2'-O-methyl modified
  modified_base 14: mod_base = OTHER; note = 2'-fluoro modified
  modified_base 15: mod_base = OTHER; note = 2'-O-methyl modified
  modified_base 16: mod_base = OTHER; note = 2'-O-methyl modified
  modified_base 17: mod_base = OTHER; note = 2'-O-methyl modified
  modified_base 18: mod_base = OTHER; note = 2'-O-methyl modified
  modified_base 19: mod_base = OTHER; note = 2'-O-methyl modified
  modified_base 20: mod_base = OTHER; note = 2'-O-methyl modified with phosphodiester linkage to following ribonucleotide
  modified_base 21: mod_base = OTHER; note = 2'-O-methyl modified with phosphodiester linkage to following ribonucleotide
  modified_base 22: mod_base = OTHER; note = 2'-O-methyl modified
  source 1..22: mol_type = other RNA
tcacagcccctttcctcacagg

SEQ ID NO: 837 - RNA, 22 nt, synthetic construct
  misc_feature 1..22: note = synthetic construct
  modified_base 1: mod_base = OTHER; note = 5'-methoxyphosphonate-4'-oxy modified
  modified_base 2: mod_base = OTHER; note = 2'-fluoro modified with phosphodiester linkage to following ribonucleotide
  modified_base 3: mod_base = OTHER; note = 2'-fluoro modified with phosphodiester linkage to following ribonucleotide
  modified_base 4: mod_base = OTHER; note = 2'-fluoro modified
  modified_base 5: mod_base = OTHER; note = 2'-fluoro modified
  modified_base 6: mod_base = OTHER; note = 2'-O-methyl modified
  modified_base 7: mod_base = OTHER; note = 2'-fluoro modified
  modified_base 8: mod_base = OTHER; note = 2'-O-methyl modified
  modified_base 9: mod_base = OTHER; note = 2'-O-methyl modified
  modified_base 10: mod_base = OTHER; note = 2'-fluoro modified
  modified_base 11: mod_base = OTHER; note = 2'-O-methyl modified
  modified_base 12: mod_base = OTHER; note = 2'-O-methyl modified
  modified_base 13: mod_base = OTHER; note = 2'-O-methyl modified
  modified_base 14: mod_base = OTHER; note = 2'-fluoro modified
  modified_base 15: mod_base = OTHER; note = 2'-O-methyl modified
  modified_base 16: mod_base = OTHER; note = 2'-O-methyl modified
  modified_base 17: mod_base = OTHER; note = 2'-O-methyl modified
  modified_base 18: mod_base = OTHER; note = 2'-O-methyl modified
  modified_base 19: mod_base = OTHER; note = 2'-O-methyl modified
  modified_base 20: mod_base = OTHER; note = 2'-O-methyl modified with phosphodiester linkage to following ribonucleotide
  modified_base 21: mod_base = OTHER; note = 2'-O-methyl modified with phosphodiester linkage to following ribonucleotide
  modified_base 22: mod_base = OTHER; note = 2'-O-methyl modified
  source 1..22: mol_type = other RNA
tgcacagcccctttcctcacgg

SEQ ID NO: 838 - RNA, 22 nt, synthetic construct
  misc_feature 1..22: note = synthetic construct
  modified_base 1: mod_base = OTHER; note = 5'-methoxyphosphonate-4'-oxy modified
  modified_base 2: mod_base = OTHER; note = 2'-fluoro modified with phosphodiester linkage to following ribonucleotide
  modified_base 3: mod_base = OTHER; note = 2'-fluoro modified with phosphodiester linkage to following ribonucleotide
  modified_base 4: mod_base = OTHER; note = 2'-fluoro modified
  modified_base 5: mod_base = OTHER; note = 2'-fluoro modified
  modified_base 6: mod_base = OTHER; note = 2'-O-methyl modified
  modified_base 7: mod_base = OTHER; note = 2'-fluoro modified
  modified_base 8: mod_base = OTHER; note = 2'-O-methyl modified
  modified_base 9: mod_base = OTHER; note = 2'-O-methyl modified
  modified_base 10: mod_base = OTHER; note = 2'-fluoro modified
  modified_base 11: mod_base = OTHER; note = 2'-O-methyl modified
  modified_base 12: mod_base = OTHER; note = 2'-O-methyl modified
  modified_base 13: mod_base = OTHER; note = 2'-O-methyl modified
  modified_base 14: mod_base = OTHER; note = 2'-fluoro modified
  modified_base 15: mod_base = OTHER; note = 2'-O-methyl modified
  modified_base 16: mod_base = OTHER; note = 2'-O-methyl modified
  modified_base 17: mod_base = OTHER; note = 2'-O-methyl modified
  modified_base 18: mod_base = OTHER; note = 2'-O-methyl modified
  modified_base 19: mod_base = OTHER; note = 2'-O-methyl modified
  modified_base 20: mod_base = OTHER; note = 2'-O-methyl modified with phosphodiester linkage to following ribonucleotide
  modified_base 21: mod_base = OTHER; note = 2'-O-methyl modified with phosphodiester linkage to following ribonucleotide
  modified_base 22: mod_base = OTHER; note = 2'-O-methyl modified
  source 1..22: mol_type = other RNA
tattgaaggtgtctccagctgg

SEQ ID NO: 839 - RNA, 22 nt, synthetic construct
  misc_feature 1..22: note = synthetic construct
  modified_base 1: mod_base = OTHER; note = 5'-methoxyphosphonate-4'-oxy modified
  modified_base 2: mod_base = OTHER; note = 2'-fluoro modified with phosphodiester linkage to following ribonucleotide
  modified_base 3: mod_base = OTHER; note = 2'-fluoro modified with phosphodiester linkage to following ribonucleotide
  modified_base 4: mod_base = OTHER; note = 2'-fluoro modified
  modified_base 5: mod_base = OTHER; note = 2'-fluoro modified
  modified_base 6: mod_base = OTHER; note = 2'-O-methyl modified
  modified_base 7: mod_base = OTHER; note = 2'-fluoro modified
  modified_base 8: mod_base = OTHER; note = 2'-O-methyl modified
  modified_base 9: mod_base = OTHER; note = 2'-O-methyl modified
  modified_base 10: mod_base = OTHER; note = 2'-fluoro modified
  modified_base 11: mod_base = OTHER; note = 2'-O-methyl modified
  modified_base 12: mod_base = OTHER; note = 2'-O-methyl modified
  modified_base 13: mod_base = OTHER; note = 2'-O-methyl modified
  modified_base 14: mod_base = OTHER; note = 2'-fluoro modified
  modified_base 15: mod_base = OTHER; note = 2'-O-methyl modified
  modified_base 16: mod_base = OTHER; note = 2'-O-methyl modified
  modified_base 17: mod_base = OTHER; note = 2'-O-methyl modified
  modified_base 18: mod_base = OTHER; note = 2'-O-methyl modified
  modified_base 19: mod_base = OTHER; note = 2'-O-methyl modified
  modified_base 20: mod_base = OTHER; note = 2'-O-methyl modified with phosphodiester linkage to following ribonucleotide
  modified_base 21: mod_base = OTHER; note = 2'-O-methyl modified with phosphodiester linkage to following ribonucleotide
  modified_base 22: mod_base = OTHER; note = 2'-O-methyl modified
  source 1..22: mol_type = other RNA
tcctttcctcacacgaccatgg

SEQ ID NO: 840 - RNA, 22 nt, synthetic construct
  misc_feature 1..22: note = synthetic construct
  modified_base 1: mod_base = OTHER; note = 5'-methoxyphosphonate-4'-oxy modified
  modified_base 2: mod_base = OTHER; note = 2'-fluoro modified with phosphodiester linkage to following ribonucleotide
  modified_base 3: mod_base = OTHER; note = 2'-fluoro modified with phosphodiester linkage to following ribonucleotide
  modified_base 4: mod_base = OTHER; note = 2'-fluoro modified
  modified_base 5: mod_base = OTHER; note = 2'-fluoro modified
  modified_base 6: mod_base = OTHER; note = 2'-O-methyl modified
  modified_base 7: mod_base = OTHER; note = 2'-fluoro modified
  modified_base 8: mod_base = OTHER; note = 2'-O-methyl modified
  modified_base 9: mod_base = OTHER; note = 2'-O-methyl modified
  modified_base 10: mod_base = OTHER; note = 2'-fluoro modified
  modified_base 11: mod_base = OTHER; note = 2'-O-methyl modified
  modified_base 12: mod_base = OTHER; note = 2'-O-methyl modified
  modified_base 13: mod_base = OTHER; note = 2'-O-methyl modified
  modified_base 14: mod_base = OTHER; note = 2'-fluoro modified
  modified_base 15: mod_base = OTHER; note = 2'-O-methyl modified
  modified_base 16: mod_base = OTHER; note = 2'-O-methyl modified
  modified_base 17: mod_base = OTHER; note = 2'-O-methyl modified
  modified_base 18: mod_base = OTHER; note = 2'-O-methyl modified
  modified_base 19: mod_base = OTHER; note = 2'-O-methyl modified
  modified_base 20: mod_base = OTHER; note = 2'-O-methyl modified with phosphodiester linkage to following ribonucleotide
  modified_base 21: mod_base = OTHER; note = 2'-O-methyl modified with phosphodiester linkage to following ribonucleotide
  modified_base 22: mod_base = OTHER; note = 2'-O-methyl modified
  source 1..22: mol_type = other RNA
taaagtctgtagcagacacagg

SEQ ID NO: 841 - RNA, 22 nt, synthetic construct
  misc_feature 1..22: note = synthetic construct
  modified_base 1: mod_base = OTHER; note = 5'-methoxyphosphonate-4'-oxy modified
  modified_base 2: mod_base = OTHER; note = 2'-fluoro modified with phosphodiester linkage to following ribonucleotide
  modified_base 3: mod_base = OTHER; note = 2'-fluoro modified with phosphodiester linkage to following ribonucleotide
  modified_base 4: mod_base = OTHER; note = 2'-fluoro modified
  modified_base 5: mod_base = OTHER; note = 2'-fluoro modified
  modified_base 6: mod_base = OTHER; note = 2'-O-methyl modified
  modified_base 7: mod_base = OTHER; note = 2'-fluoro modified
  modified_base 8: mod_base = OTHER; note = 2'-O-methyl modified
  modified_base 9: mod_base = OTHER; note = 2'-O-methyl modified
  modified_base 10: mod_base = OTHER; note = 2'-fluoro modified
  modified_base 11: mod_base = OTHER; note = 2'-O-methyl modified
  modified_base 12: mod_base = OTHER; note = 2'-O-methyl modified
  modified_base 13: mod_base = OTHER; note = 2'-O-methyl modified
  modified_base 14: mod_base = OTHER; note = 2'-fluoro modified
  modified_base 15: mod_base = OTHER; note = 2'-O-methyl modified
  modified_base 16: mod_base = OTHER; note = 2'-O-methyl modified
  modified_base 17: mod_base = OTHER; note = 2'-O-methyl modified
  modified_base 18: mod_base = OTHER; note = 2'-O-methyl modified
  modified_base 19: mod_base = OTHER; note = 2'-O-methyl modified
  modified_base 20: mod_base = OTHER; note = 2'-O-methyl modified with phosphodiester linkage to following ribonucleotide
  modified_base 21: mod_base = OTHER; note = 2'-O-methyl modified with phosphodiester linkage to following ribonucleotide
  modified_base 22: mod_base = OTHER; note = 2'-O-methyl modified
  source 1..22: mol_type = other RNA
ttctcaaagtctgtagcagagg

SEQ ID NO: 842 - RNA, 22 nt, synthetic construct
  misc_feature 1..22: note = synthetic construct
  modified_base 1: mod_base = OTHER; note = 5'-methoxyphosphonate-4'-oxy modified
  modified_base 2: mod_base = OTHER; note = 2'-fluoro modified with phosphodiester linkage to following ribonucleotide
  modified_base 3: mod_base = OTHER; note = 2'-fluoro modified with phosphodiester linkage to following ribonucleotide
  modified_base 4: mod_base = OTHER; note = 2'-fluoro modified
  modified_base 5: mod_base = OTHER; note = 2'-fluoro modified
  modified_base 6: mod_base = OTHER; note = 2'-O-methyl modified
  modified_base 7: mod_base = OTHER; note = 2'-fluoro modified
  modified_base 8: mod_base = OTHER; note = 2'-O-methyl modified
  modified_base 9: mod_base = OTHER; note = 2'-O-methyl modified
  modified_base 10: mod_base = OTHER; note = 2'-fluoro modified
  modified_base 11: mod_base = OTHER; note = 2'-O-methyl modified
  modified_base 12: mod_base = OTHER; note = 2'-O-methyl modified
  modified_base 13: mod_base = OTHER; note = 2'-O-methyl modified
  modified_base 14: mod_base = OTHER; note = 2'-fluoro modified
  modified_base 15: mod_base = OTHER; note = 2'-O-methyl modified
  modified_base 16: mod_base = OTHER; note = 2'-O-methyl modified
  modified_base 17: mod_base = OTHER; note = 2'-O-methyl modified
  modified_base 18: mod_base = OTHER; note = 2'-O-methyl modified
  modified_base 19: mod_base = OTHER; note = 2'-O-methyl modified
  modified_base 20: mod_base = OTHER; note = 2'-O-methyl modified with phosphodiester linkage to following ribonucleotide
  modified_base 21: mod_base = OTHER; note = 2'-O-methyl modified with phosphodiester linkage to following ribonucleotide
  modified_base 22: mod_base = OTHER; note = 2'-O-methyl modified
  source 1..22: mol_type = other RNA
tcaaccttctcaaagtctgtgg

SEQ ID NO: 843 - RNA, 22 nt, synthetic construct
  misc_feature 1..22: note = synthetic construct
  modified_base 1: mod_base = OTHER; note = 5'-methoxyphosphonate-4'-oxy modified
  modified_base 2: mod_base = OTHER; note = 2'-fluoro modified with phosphodiester linkage to following ribonucleotide
  modified_base 3: mod_base = OTHER; note = 2'-fluoro modified with phosphodiester linkage to following ribonucleotide
  modified_base 4: mod_base = OTHER; note = 2'-fluoro modified
  modified_base 5: mod_base = OTHER; note = 2'-fluoro modified
  modified_base 6: mod_base = OTHER; note = 2'-O-methyl modified
  modified_base 7: mod_base = OTHER; note = 2'-fluoro modified
  modified_base 8: mod_base = OTHER; note = 2'-O-methyl modified
  modified_base 9: mod_base = OTHER; note = 2'-O-methyl modified
  modified_base 10: mod_base = OTHER; note = 2'-fluoro modified
  modified_base 11: mod_base = OTHER; note = 2'-O-methyl modified
  modified_base 12: mod_base = OTHER; note = 2'-O-methyl modified
  modified_base 13: mod_base = OTHER; note = 2'-O-methyl modified
  modified_base 14: mod_base = OTHER; note = 2'-fluoro modified
  modified_base 15: mod_base = OTHER; note = 2'-O-methyl modified
  modified_base 16: mod_base = OTHER; note = 2'-O-methyl modified
  modified_base 17: mod_base = OTHER; note = 2'-O-methyl modified
  modified_base 18: mod_base = OTHER; note = 2'-O-methyl modified
  modified_base 19: mod_base = OTHER; note = 2'-O-methyl modified
  modified_base 20: mod_base = OTHER; note = 2'-O-methyl modified with phosphodiester linkage to following ribonucleotide
  modified_base 21: mod_base = OTHER; note = 2'-O-methyl modified with phosphodiester linkage to following ribonucleotide
  modified_base 22: mod_base = OTHER; note = 2'-O-methyl modified
  source 1..22: mol_type = other RNA
tatcaaccttctcaaagtctgg

SEQ ID NO: 844 - RNA, 22 nt, synthetic construct
  misc_feature 1..22: note = synthetic construct
  modified_base 1: mod_base = OTHER; note = 5'-methoxyphosphonate-4'-oxy modified
  modified_base 2: mod_base = OTHER; note = 2'-fluoro modified with phosphodiester linkage to following ribonucleotide
  modified_base 3: mod_base = OTHER; note = 2'-fluoro modified with phosphodiester linkage to following ribonucleotide
  modified_base 4: mod_base = OTHER; note = 2'-fluoro modified
  modified_base 5: mod_base = OTHER; note = 2'-fluoro modified
  modified_base 6: mod_base = OTHER; note = 2'-O-methyl modified
  modified_base 7: mod_base = OTHER; note = 2'-fluoro modified
  modified_base 8: mod_base = OTHER; note = 2'-O-methyl modified
  modified_base 9: mod_base = OTHER; note = 2'-O-methyl modified
  modified_base 10: mod_base = OTHER; note = 2'-fluoro modified
  modified_base 11: mod_base = OTHER; note = 2'-O-methyl modified
  modified_base 12: mod_base = OTHER; note = 2'-O-methyl modified
  modified_base 13: mod_base = OTHER; note = 2'-O-methyl modified
  modified_base 14: mod_base = OTHER; note = 2'-fluoro modified
  modified_base 15: mod_base = OTHER; note = 2'-O-methyl modified
  modified_base 16: mod_base = OTHER; note = 2'-O-methyl modified
  modified_base 17: mod_base = OTHER; note = 2'-O-methyl modified
  modified_base 18: mod_base = OTHER; note = 2'-O-methyl modified
  modified_base 19: mod_base = OTHER; note = 2'-O-methyl modified
  modified_base 20: mod_base = OTHER; note = 2'-O-methyl modified with phosphodiester linkage to following ribonucleotide
  modified_base 21: mod_base = OTHER; note = 2'-O-methyl modified with phosphodiester linkage to following ribonucleotide
  modified_base 22: mod_base = OTHER; note = 2'-O-methyl modified
  source 1..22: mol_type = other RNA
tcttgaactgggtcagatcagg

SEQ ID NO: 845 - RNA, 22 nt, synthetic construct
  misc_feature 1..22: note = synthetic construct
  modified_base 1: mod_base = OTHER; note = 5'-methoxyphosphonate-4'-oxy modified
  modified_base 2: mod_base = OTHER; note = 2'-fluoro modified with phosphodiester linkage to following ribonucleotide
  modified_base 3: mod_base = OTHER; note = 2'-fluoro modified with phosphodiester linkage to following ribonucleotide
  modified_base 4: mod_base = OTHER; note = 2'-fluoro modified
  modified_base 5: mod_base = OTHER; note = 2'-fluoro modified
  modified_base 6: mod_base = OTHER; note = 2'-O-methyl modified
  modified_base 7: mod_base = OTHER; note = 2'-fluoro modified
  modified_base 8: mod_base = OTHER; note = 2'-O-methyl modified
  modified_base 9: mod_base = OTHER; note = 2'-O-methyl modified
  modified_base 10: mod_base = OTHER; note = 2'-fluoro modified
  modified_base 11: mod_base = OTHER; note = 2'-O-methyl modified
  modified_base 12: mod_base = OTHER; note = 2'-O-methyl modified
  modified_base 13: mod_base = OTHER; note = 2'-O-methyl modified
  modified_base 14: mod_base = OTHER; note = 2'-fluoro modified
  modified_base 15: mod_base = OTHER; note = 2'-O-methyl modified
  modified_base 16: mod_base = OTHER; note = 2'-O-methyl modified
  modified_base 17: mod_base = OTHER; note = 2'-O-methyl modified
  modified_base 18: mod_base = OTHER; note = 2'-O-methyl modified
  modified_base 19: mod_base = OTHER; note = 2'-O-methyl modified
  modified_base 20: mod_base = OTHER; note = 2'-O-methyl modified with phosphodiester linkage to following ribonucleotide
  modified_base 21: mod_base = OTHER; note = 2'-O-methyl modified with phosphodiester linkage to following ribonucleotide
  modified_base 22: mod_base = OTHER; note = 2'-O-methyl modified
  source 1..22: mol_type = other RNA
taaacaccacgtctccgtaggg

SEQ ID NO: 846 - RNA, 22 nt, synthetic construct
  misc_feature 1..22: note = synthetic construct
  modified_base 1: mod_base = OTHER; note = 5'-methoxyphosphonate-4'-oxy modified
  modified_base 2: mod_base = OTHER; note = 2'-fluoro modified with phosphodiester linkage to following ribonucleotide
  modified_base 3: mod_base = OTHER; note = 2'-fluoro modified with phosphodiester linkage to following ribonucleotide
  modified_base 4: mod_base = OTHER; note = 2'-fluoro modified
  modified_base 5: mod_base = OTHER; note = 2'-fluoro modified
  modified_base 6: mod_base = OTHER; note = 2'-O-methyl modified
  modified_base 7: mod_base = OTHER; note = 2'-fluoro modified
  modified_base 8: mod_base = OTHER; note = 2'-O-methyl modified
  modified_base 9: mod_base = OTHER; note = 2'-O-methyl modified
  modified_base 10: mod_base = OTHER; note = 2'-fluoro modified
  modified_base 11: mod_base = OTHER; note = 2'-O-methyl modified
  modified_base 12: mod_base = OTHER; note = 2'-O-methyl modified
  modified_base 13: mod_base = OTHER; note = 2'-O-methyl modified
  modified_base 14: mod_base = OTHER; note = 2'-fluoro modified
  modified_base 15: mod_base = OTHER; note = 2'-O-methyl modified
  modified_base 16: mod_base = OTHER; note = 2'-O-methyl modified
  modified_base 17: mod_base = OTHER; note = 2'-O-methyl modified
  modified_base 18: mod_base = OTHER; note = 2'-O-methyl modified
  modified_base 19: mod_base = OTHER; note = 2'-O-methyl modified
  modified_base 20: mod_base = OTHER; note = 2'-O-methyl modified with phosphodiester linkage to following ribonucleotide
  modified_base 21: mod_base = OTHER; note = 2'-O-methyl modified with phosphodiester linkage to following ribonucleotide
  modified_base 22: mod_base = OTHER; note = 2'-O-methyl modified
  source 1..22: mol_type = other RNA
tcatctttgctgacaaacacgg

SEQ ID NO: 847 - RNA, 22 nt, synthetic construct
  misc_feature 1..22: note = synthetic construct
  modified_base 1: mod_base = OTHER; note = 5'-methoxyphosphonate-4'-oxy modified
  modified_base 2: mod_base = OTHER; note = 2'-fluoro modified with phosphodiester linkage to following ribonucleotide
  modified_base 3: mod_base = OTHER; note = 2'-fluoro modified with phosphodiester linkage to following ribonucleotide
  modified_base 4: mod_base = OTHER; note = 2'-fluoro modified
  modified_base 5: mod_base = OTHER; note = 2'-fluoro modified
  modified_base 6: mod_base = OTHER; note = 2'-O-methyl modified
  modified_base 7: mod_base = OTHER; note = 2'-fluoro modified
  modified_base 8: mod_base = OTHER; note = 2'-O-methyl modified
  modified_base 9: mod_base = OTHER; note = 2'-O-methyl modified
  modified_base 10: mod_base = OTHER; note = 2'-fluoro modified
  modified_base 11: mod_base = OTHER; note = 2'-O-methyl modified
  modified_base 12: mod_base = OTHER; note = 2'-O-methyl modified
  modified_base 13: mod_base = OTHER; note = 2'-O-methyl modified
  modified_base 14: mod_base = OTHER; note = 2'-fluoro modified
  modified_base 15: mod_base = OTHER; note = 2'-O-methyl modified
  modified_base 16: mod_base = OTHER; note = 2'-O-methyl modified
  modified_base 17: mod_base = OTHER; note = 2'-O-methyl modified
  modified_base 18: mod_base = OTHER; note = 2'-O-methyl modified
  modified_base 19: mod_base = OTHER; note = 2'-O-methyl modified
  modified_base 20: mod_base = OTHER; note = 2'-O-methyl modified with phosphodiester linkage to following ribonucleotide
  modified_base 21: mod_base = OTHER; note = 2'-O-methyl modified with phosphodiester linkage to following ribonucleotide
  modified_base 22: mod_base = OTHER; note = 2'-O-methyl modified
  source 1..22: mol_type = other RNA
tccacatctttgctgacaaagg

SEQ ID NO: 848 - RNA, 22 nt, synthetic construct
  misc_feature 1..22: note = synthetic construct
  modified_base 1: mod_base = OTHER; note = 5'-methoxyphosphonate-4'-oxy modified
  modified_base 2: mod_base = OTHER; note = 2'-fluoro modified with phosphodiester linkage to following ribonucleotide
  modified_base 3: mod_base = OTHER; note = 2'-fluoro modified with phosphodiester linkage to following ribonucleotide
  modified_base 4: mod_base = OTHER; note = 2'-fluoro modified
  modified_base 5: mod_base = OTHER; note = 2'-fluoro modified
  modified_base 6: mod_base = OTHER; note = 2'-O-methyl modified
  modified_base 7: mod_base = OTHER; note = 2'-fluoro modified
  modified_base 8: mod_base = OTHER; note = 2'-O-methyl modified
  modified_base 9: mod_base = OTHER; note = 2'-O-methyl modified
  modified_base 10: mod_base = OTHER; note = 2'-fluoro modified
  modified_base 11: mod_base = OTHER; note = 2'-O-methyl modified
  modified_base 12: mod_base = OTHER; note = 2'-O-methyl modified
  modified_base 13: mod_base = OTHER; note = 2'-O-methyl modified
  modified_base 14: mod_base = OTHER; note = 2'-fluoro modified
  modified_base 15: mod_base = OTHER; note = 2'-O-methyl modified
  modified_base 16: mod_base = OTHER; note = 2'-O-methyl modified
  modified_base 17: mod_base = OTHER; note = 2'-O-methyl modified
  modified_base 18: mod_base = OTHER; note = 2'-O-methyl modified
  modified_base 19: mod_base = OTHER; note = 2'-O-methyl modified
  modified_base 20: mod_base = OTHER; note = 2'-O-methyl modified with phosphodiester linkage to following ribonucleotide
  modified_base 21: mod_base = OTHER; note = 2'-O-methyl modified with phosphodiester linkage to following ribonucleotide
  modified_base 22: mod_base = OTHER; note = 2'-O-methyl modified
  source 1..22: mol_type = other RNA
ttgctgactggaaccccaaggg

SEQ ID NO: 849 - RNA, 22 nt, synthetic construct
  misc_feature 1..22: note = synthetic construct
  modified_base 1: mod_base = OTHER; note = 5'-methoxyphosphonate-4'-oxy modified
  modified_base 2: mod_base = OTHER; note = 2'-fluoro modified with phosphodiester linkage to following ribonucleotide
  modified_base 3: mod_base = OTHER; note = 2'-fluoro modified with phosphodiester linkage to following ribonucleotide
  modified_base 4: mod_base = OTHER; note = 2'-fluoro modified
  modified_base 5: mod_base = OTHER; note = 2'-fluoro modified
  modified_base 6: mod_base = OTHER; note = 2'-O-methyl modified
  modified_base 7: mod_base = OTHER; note = 2'-fluoro modified
  modified_base 8: mod_base = OTHER; note = 2'-O-methyl modified
  modified_base 9: mod_base = OTHER; note = 2'-O-methyl modified
  modified_base 10: mod_base = OTHER; note = 2'-fluoro modified
  modified_base 11: mod_base = OTHER; note = 2'-O-methyl modified
  modified_base 12: mod_base = OTHER; note = 2'-O-methyl modified
  modified_base 13: mod_base = OTHER; note = 2'-O-methyl modified
  modified_base 14: mod_base = OTHER; note = 2'-fluoro modified
  modified_base 15: mod_base = OTHER; note = 2'-O-methyl modified
  modified_base 16: mod_base = OTHER; note = 2'-O-methyl modified
  modified_base 17: mod_base = OTHER; note = 2'-O-methyl modified
  modified_base 18: mod_base = OTHER; note = 2'-O-methyl modified
  modified_base 19: mod_base = OTHER; note = 2'-O-methyl modified
  modified_base 20: mod_base = OTHER; note = 2'-O-methyl modified with phosphodiester linkage to following ribonucleotide
  modified_base 21: mod_base = OTHER; note = 2'-O-methyl modified with phosphodiester linkage to following ribonucleotide
  modified_base 22: mod_base = OTHER; note = 2'-O-methyl modified
  source 1..22: mol_type = other RNA
tgaatctcagtgcttcctgcgg

SEQ ID NO: 850 - RNA, 22 nt, synthetic construct
  misc_feature 1..22: note = synthetic construct
  modified_base 1: mod_base = OTHER; note = 5'-methoxyphosphonate-4'-oxy modified
  modified_base 2: mod_base = OTHER; note = 2'-fluoro modified with phosphodiester linkage to following ribonucleotide
  modified_base 3: mod_base = OTHER; note = 2'-fluoro modified with phosphodiester linkage to following ribonucleotide
  modified_base 4: mod_base = OTHER; note = 2'-fluoro modified
  modified_base 5: mod_base = OTHER; note = 2'-fluoro modified
  modified_base 6: mod_base = OTHER; note = 2'-O-methyl modified
  modified_base 7: mod_base = OTHER; note = 2'-fluoro modified
  modified_base 8: mod_base = OTHER; note = 2'-fluoro modified
  modified_base 9: mod_base = OTHER; note = 2'-O-methyl modified
  modified_base 10: mod_base = OTHER; note = 2'-fluoro modified
  modified_base 11: mod_base = OTHER; note = 2'-O-methyl modified
  modified_base 12: mod_base = OTHER; note = 2'-O-methyl modified
  modified_base 13: mod_base = OTHER; note = 2'-O-methyl modified
  modified_base 14: mod_base = OTHER; note = 2'-fluoro modified
  modified_base 15: mod_base = OTHER; note = 2'-O-methyl modified
  modified_base 16: mod_base = OTHER; note = 2'-fluoro modified
  modified_base 17: mod_base = OTHER; note = 2'-O-methyl modified
  modified_base 18: mod_base = OTHER; note = 2'-O-methyl modified
  modified_base 19: mod_base = OTHER; note = 2'-fluoro modified
  modified_base 20: mod_base = OTHER; note = 2'-O-methyl modified with phosphodiester linkage to following ribonucleotide
  modified_base 21: mod_base = OTHER; note = 2'-O-methyl modified with phosphodiester linkage to following ribonucleotide
  modified_base 22: mod_base = OTHER; note = 2'-O-methyl modified
  source 1..22: mol_type = other RNA
tacaggatctgcttctcttcgg

SEQ ID NO: 851 - RNA, 22 nt, synthetic construct
  misc_feature 1..22: note = synthetic construct
  modified_base 1: mod_base = OTHER; note = 5'-methoxyphosphonate-4'-oxy modified
  modified_base 2: mod_base = OTHER; note = 2'-fluoro modified with phosphodiester linkage to following ribonucleotide
  modified_base 3: mod_base = OTHER; note = 2'-fluoro modified with phosphodiester linkage to following ribonucleotide
  modified_base 4: mod_base = OTHER; note = 2'-fluoro modified
  modified_base 5: mod_base = OTHER; note = 2'-fluoro modified
  modified_base 6: mod_base = OTHER; note = 2'-O-methyl modified
  modified_base 7: mod_base = OTHER; note = 2'-fluoro modified
  modified_base 8: mod_base = OTHER; note = 2'-fluoro modified
  modified_base 9: mod_base = OTHER; note = 2'-O-methyl modified
  modified_base 10: mod_base = OTHER; note = 2'-fluoro modified
  modified_base 11: mod_base = OTHER; note = 2'-O-methyl modified
  modified_base 12: mod_base = OTHER; note = 2'-O-methyl modified
  modified_base 13: mod_base = OTHER; note = 2'-O-methyl modified
  modified_base 14: mod_base = OTHER; note = 2'-fluoro modified
  modified_base 15: mod_base = OTHER; note = 2'-O-methyl modified
  modified_base 16: mod_base = OTHER; note = 2'-fluoro modified
  modified_base 17: mod_base = OTHER; note = 2'-O-methyl modified
  modified_base 18: mod_base = OTHER; note = 2'-O-methyl modified
  modified_base 19: mod_base = OTHER; note = 2'-fluoro modified
  modified_base 20: mod_base = OTHER; note = 2'-O-methyl modified with phosphodiester linkage to following ribonucleotide
  modified_base 21: mod_base = OTHER; note = 2'-O-methyl modified with phosphodiester linkage to following ribonucleotide
  modified_base 22: mod_base = OTHER; note = 2'-O-methyl modified
  source 1..22: mol_type = other RNA
tagttgttgatgatgcagcagg

SEQ ID NO: 852 - RNA, 22 nt, synthetic construct
  misc_feature 1..22: note = synthetic construct
  modified_base 1: mod_base = OTHER; note = 5'-methoxyphosphonate-4'-oxy modified
  modified_base 2: mod_base = OTHER; note = 2'-fluoro modified with phosphodiester linkage to following ribonucleotide
  modified_base 3: mod_base = OTHER; note = 2'-fluoro modified with phosphodiester linkage to following ribonucleotide
  modified_base 4: mod_base = OTHER; note = 2'-fluoro modified
  modified_base 5: mod_base = OTHER; note = 2'-fluoro modified
  modified_base 6: mod_base = OTHER; note = 2'-O-methyl modified
  modified_base 7: mod_base = OTHER; note = 2'-fluoro modified
  modified_base 8: mod_base = OTHER; note = 2'-fluoro modified
  modified_base 9: mod_base = OTHER; note = 2'-O-methyl modified
  modified_base 10: mod_base = OTHER; note = 2'-fluoro modified
  modified_base 11: mod_base = OTHER; note = 2'-O-methyl modified
  modified_base 12: mod_base = OTHER; note = 2'-O-methyl modified
  modified_base 13: mod_base = OTHER; note = 2'-O-methyl modified
  modified_base 14: mod_base = OTHER; note = 2'-fluoro modified
  modified_base 15: mod_base = OTHER; note = 2'-O-methyl modified
  modified_base 16: mod_base = OTHER; note = 2'-fluoro modified
  modified_base 17: mod_base = OTHER; note = 2'-O-methyl modified
  modified_base 18: mod_base = OTHER; note = 2'-O-methyl modified
  modified_base 19: mod_base = OTHER; note = 2'-fluoro modified
  modified_base 20: mod_base = OTHER; note = 2'-O-methyl modified with phosphodiester linkage to following ribonucleotide
  modified_base 21: mod_base = OTHER; note = 2'-O-methyl modified with phosphodiester linkage to following ribonucleotide
  modified_base 22: mod_base = OTHER; note = 2'-O-methyl modified
  source 1..22: mol_type = other RNA
tagcacaatggtacggttgcgg

SEQ ID NO: 853 - RNA, 22 nt, synthetic construct
  misc_feature 1..22: note = synthetic construct
  modified_base 1: mod_base = OTHER; note = 5'-methoxyphosphonate-4'-oxy modified
  modified_base 2: mod_base = OTHER; note = 2'-fluoro modified with phosphodiester linkage to following ribonucleotide
  modified_base 3: mod_base = OTHER; note = 2'-fluoro modified with phosphodiester linkage to following ribonucleotide
  modified_base 4: mod_base = OTHER; note = 2'-fluoro modified
  modified_base 5: mod_base = OTHER; note = 2'-fluoro modified
  modified_base 6: mod_base = OTHER; note = 2'-O-methyl modified
  modified_base 7: mod_base = OTHER; note = 2'-fluoro modified
  modified_base 8: mod_base = OTHER; note = 2'-fluoro modified
  modified_base 9: mod_base = OTHER; note = 2'-O-methyl modified
  modified_base 10: mod_base = OTHER; note = 2'-fluoro modified
  modified_base 11: mod_base = OTHER; note = 2'-O-methyl modified
  modified_base 12: mod_base = OTHER; note = 2'-O-methyl modified
  modified_base 13: mod_base = OTHER; note = 2'-O-methyl modified
  modified_base 14: mod_base = OTHER; note = 2'-fluoro modified
  modified_base 15: mod_base = OTHER; note = 2'-O-methyl modified
  modified_base 16: mod_base = OTHER; note = 2'-fluoro modified
  modified_base 17: mod_base = OTHER; note = 2'-O-methyl modified
  modified_base 18: mod_base = OTHER; note = 2'-O-methyl modified
  modified_base 19: mod_base = OTHER; note = 2'-fluoro modified
  modified_base 20: mod_base = OTHER; note = 2'-O-methyl modified with phosphodiester linkage to following ribonucleotide
  modified_base 21: mod_base = OTHER; note = 2'-O-methyl modified with phosphodiester linkage to following ribonucleotide
  modified_base 22: mod_base = OTHER; note = 2'-O-methyl modified
  source 1..22: mol_type = other RNA
ttagcagacacatctggcaggg

SEQ ID NO: 854 - RNA, 22 nt, synthetic construct
  misc_feature 1..22: note = synthetic construct
  modified_base 1: mod_base = OTHER; note = 5'-methoxyphosphonate-4'-oxy modified
  modified_base 2: mod_base = OTHER; note = 2'-fluoro modified with phosphodiester linkage to following ribonucleotide
  modified_base 3: mod_base = OTHER; note = 2'-fluoro modified with phosphodiester linkage to following ribonucleotide
  modified_base 4: mod_base = OTHER; note = 2'-fluoro modified
  modified_base 5: mod_base = OTHER; note = 2'-fluoro modified
  modified_base 6: mod_base = OTHER; note = 2'-O-methyl modified
  modified_base 7: mod_base = OTHER; note = 2'-fluoro modified
  modified_base 8: mod_base = OTHER; note = 2'-fluoro modified
  modified_base 9: mod_base = OTHER; note = 2'-O-methyl modified
  modified_base 10: mod_base = OTHER; note = 2'-fluoro modified
  modified_base 11: mod_base = OTHER; note = 2'-O-methyl modified
  modified_base 12: mod_base = OTHER; note = 2'-O-methyl modified
  modified_base 13: mod_base = OTHER; note = 2'-O-methyl modified
  modified_base 14: mod_base = OTHER; note = 2'-fluoro modified
  modified_base 15: mod_base = OTHER; note = 2'-O-methyl modified
  modified_base 16: mod_base = OTHER; note = 2'-fluoro modified
  modified_base 17: mod_base = OTHER; note = 2'-O-methyl modified
  modified_base 18: mod_base = OTHER; note = 2'-O-methyl modified
  modified_base 19: mod_base = OTHER; note = 2'-fluoro modified
  modified_base 20: mod_base = OTHER; note = 2'-O-methyl modified with phosphodiester linkage to following ribonucleotide
  modified_base 21: mod_base = OTHER; note = 2'-O-methyl modified with phosphodiester linkage to following ribonucleotide
  modified_base 22: mod_base = OTHER; note = 2'-O-methyl modified
  source 1..22: mol_type = other RNA
ttctgtagcagacacatctggg

SEQ ID NO: 855 - RNA, 22 nt, synthetic construct
  misc_feature 1..22: note = synthetic construct
  modified_base 1: mod_base = OTHER; note = 5'-methoxyphosphonate-4'-oxy modified
  modified_base 2: mod_base = OTHER; note = 2'-fluoro modified with phosphodiester linkage to following ribonucleotide
  modified_base 3: mod_base = OTHER; note = 2'-fluoro modified with phosphodiester linkage to following ribonucleotide
  modified_base 4: mod_base = OTHER; note = 2'-fluoro modified
  modified_base 5: mod_base = OTHER; note = 2'-fluoro modified
  modified_base 6: mod_base = OTHER; note = 2'-O-methyl modified
  modified_base 7: mod_base = OTHER; note = 2'-fluoro modified
  modified_base 8: mod_base = OTHER; note = 2'-fluoro modified
  modified_base 9: mod_base = OTHER; note = 2'-O-methyl modified
  modified_base 10: mod_base = OTHER; note = 2'-fluoro modified
  modified_base 11: mod_base = OTHER; note = 2'-O-methyl modified
  modified_base 12: mod_base = OTHER; note = 2'-O-methyl modified
  modified_base 13: mod_base = OTHER; note = 2'-O-methyl modified
  modified_base 14: mod_base = OTHER; note = 2'-fluoro modified
  modified_base 15: mod_base = OTHER; note = 2'-O-methyl modified
  modified_base 16: mod_base = OTHER; note = 2'-fluoro modified
  modified_base 17: mod_base = OTHER; note = 2'-O-methyl modified
  modified_base 18: mod_base = OTHER; note = 2'-O-methyl modified
  modified_base 19: mod_base = OTHER; note = 2'-fluoro modified
  modified_base 20: mod_base = OTHER; note = 2'-O-methyl modified with phosphodiester linkage to following ribonucleotide
  modified_base 21: mod_base = OTHER; note = 2'-O-methyl modified with phosphodiester linkage to following ribonucleotide
  modified_base 22: mod_base = OTHER; note = 2'-O-methyl modified
  source 1..22: mol_type = other RNA
tgatcaaccttctcaaagtcgg

SEQ ID NO: 856 - RNA, 22 nt, synthetic construct
  misc_feature 1..22: note = synthetic construct
  modified_base 1: mod_base = OTHER; note = 5'-methoxyphosphonate-4'-oxy modified
  modified_base 2: mod_base = OTHER; note = 2'-fluoro modified with phosphodiester linkage to following ribonucleotide
  modified_base 3: mod_base = OTHER; note = 2'-fluoro modified with phosphodiester linkage to following ribonucleotide
  modified_base 4: mod_base = OTHER; note = 2'-fluoro modified
  modified_base 5: mod_base = OTHER; note = 2'-fluoro modified
  modified_base 6: mod_base = OTHER; note = 2'-O-methyl modified
  modified_base 7: mod_base = OTHER; note = 2'-fluoro modified
  modified_base 8: mod_base = OTHER; note = 2'-fluoro modified
  modified_base 9: mod_base = OTHER; note = 2'-O-methyl modified
  modified_base 10: mod_base = OTHER; note = 2'-fluoro modified
  modified_base 11: mod_base = OTHER; note = 2'-O-methyl modified
  modified_base 12: mod_base = OTHER; note = 2'-O-methyl modified
  modified_base 13: mod_base = OTHER; note = 2'-O-methyl modified
  modified_base 14: mod_base = OTHER; note = 2'-fluoro modified
  modified_base 15: mod_base = OTHER; note = 2'-O-methyl modified
  modified_base 16: mod_base = OTHER; note = 2'-fluoro modified
  modified_base 17: mod_base = OTHER; note = 2'-O-methyl modified
  modified_base 18: mod_base = OTHER; note = 2'-O-methyl modified
  modified_base 19: mod_base = OTHER; note = 2'-fluoro modified
  modified_base 20: mod_base = OTHER; note = 2'-O-methyl modified with phosphodiester linkage to following ribonucleotide
  modified_base 21: mod_base = OTHER; note = 2'-O-methyl modified with phosphodiester linkage to following ribonucleotide
  modified_base 22: mod_base = OTHER; note = 2'-O-methyl modified
  source 1..22: mol_type = other RNA
tagatcaaccttctcaaagtgg

SEQ ID NO: 857 - RNA, 22 nt, synthetic construct
  misc_feature 1..22: note = synthetic construct
  modified_base 1: mod_base = OTHER; note = 5'-methoxyphosphonate-4'-oxy modified
  modified_base 2: mod_base = OTHER; note = 2'-fluoro modified with phosphodiester linkage to following ribonucleotide
  modified_base 3: mod_base = OTHER; note = 2'-fluoro modified with phosphodiester linkage to following ribonucleotide
  modified_base 4: mod_base = OTHER; note = 2'-fluoro modified
  modified_base 5: mod_base = OTHER; note = 2'-fluoro modified
  modified_base 6: mod_base = OTHER; note = 2'-O-methyl modified
  modified_base 7: mod_base = OTHER; note = 2'-fluoro modified
  modified_base 8: mod_base = OTHER; note = 2'-fluoro modified
  modified_base 9: mod_base = OTHER; note = 2'-O-methyl modified
  modified_base 10: mod_base = OTHER; note = 2'-fluoro modified
  modified_base 11: mod_base = OTHER; note = 2'-O-methyl modified
  modified_base 12: mod_base = OTHER; note = 2'-O-methyl modified
  modified_base 13: mod_base = OTHER; note = 2'-O-methyl modified
  modified_base 14: mod_base = OTHER; note = 2'-fluoro modified
  modified_base 15: mod_base = OTHER; note = 2'-O-methyl modified
  modified_base 16: mod_base = OTHER; note = 2'-fluoro modified
  modified_base 17: mod_base = OTHER; note = 2'-O-methyl modified
  modified_base 18: mod_base = OTHER; note = 2'-O-methyl modified
  modified_base 19: mod_base = OTHER; note = 2'-fluoro modified
  modified_base 20: mod_base = OTHER; note = 2'-O-methyl modified with phosphodiester linkage to following ribonucleotide
  modified_base 21: mod_base = OTHER; note = 2'-O-methyl modified with phosphodiester linkage to following ribonucleotide
  modified_base 22: mod_base = OTHER; note = 2'-O-methyl modified
  source 1..22: mol_type = other RNA
ttcagatcaaccttctcaaagg

SEQ ID NO: 858 - RNA, 22 nt, synthetic construct
  misc_feature 1..22: note = synthetic construct
  modified_base 1: mod_base = OTHER; note = 5'-methoxyphosphonate-4'-oxy modified
  modified_base 2: mod_base = OTHER; note = 2'-fluoro modified with phosphodiester linkage to following ribonucleotide
  modified_base 3: mod_base = OTHER; note = 2'-O-methyl modified with phosphodiester linkage to following ribonucleotide
  modified_base 4: mod_base = OTHER; note = 2'-O-methyl modified
  modified_base 5: mod_base = OTHER; note = 2'-fluoro modified
  modified_base 6: mod_base = OTHER; note = 2'-O-methyl modified
  modified_base 7: mod_base = OTHER; note = 2'-fluoro modified
  modified_base 8: mod_base = OTHER; note = 2'-fluoro modified
  modified_base 9: mod_base = OTHER; note = 2'-O-methyl modified
  modified_base 10: mod_base = OTHER; note = 2'-fluoro modified
  modified_base 11: mod_base = OTHER; note = 2'-O-methyl modified
  modified_base 12: mod_base = OTHER; note = 2'-fluoro modified
  modified_base 13: mod_base = OTHER; note = 2'-O-methyl modified
  modified_base 14: mod_base = OTHER; note = 2'-fluoro modified
  modified_base 15: mod_base = OTHER; note = 2'-O-methyl modified
  modified_base 16: mod_base = OTHER; note = 2'-fluoro modified
  modified_base 17: mod_base = OTHER; note = 2'-O-methyl modified
  modified_base 18: mod_base = OTHER; note = 2'-O-methyl modified
  modified_base 19: mod_base = OTHER; note = 2'-fluoro modified
  modified_base 20: mod_base = OTHER; note = 2'-O-methyl modified with phosphodiester linkage to following ribonucleotide
  modified_base 21: mod_base = OTHER; note = 2'-O-methyl modified with phosphodiester linkage to following ribonucleotide
  modified_base 22: mod_base = OTHER; note = 2'-O-methyl modified
  source 1..22: mol_type = other RNA
ttctccgtagccaaacagctgg

SEQ ID NO: 859 - RNA, 22 nt, synthetic construct
  misc_feature 1..22: note = synthetic construct
  modified_base 1: mod_base = OTHER; note = 5'-methoxyphosphonate-4'-oxy modified
  modified_base 2: mod_base = OTHER; note = 2'-fluoro modified with phosphodiester linkage to following ribonucleotide
  modified_base 3: mod_base = OTHER; note = 2'-fluoro modified with phosphodiester linkage to following ribonucleotide
  modified_base 4: mod_base = OTHER; note = 2'-fluoro modified
  modified_base 5: mod_base = OTHER; note = 2'-fluoro modified
  modified_base 6: mod_base = OTHER; note = 2'-O-methyl modified
  modified_base 7: mod_base = OTHER; note = 2'-fluoro modified
  modified_base 8: mod_base = OTHER; note = 2'-fluoro modified
  modified_base 9: mod_base = OTHER; note = 2'-O-methyl modified
  modified_base 10: mod_base = OTHER; note = 2'-fluoro modified
  modified_base 11: mod_base = OTHER; note = 2'-O-methyl modified
  modified_base 12: mod_base = OTHER; note = 2'-O-methyl modified
  modified_base 13: mod_base = OTHER; note = 2'-O-methyl modified
  modified_base 14: mod_base = OTHER; note = 2'-fluoro modified
  modified_base 15: mod_base = OTHER; note = 2'-O-methyl modified
  modified_base 16: mod_base = OTHER; note = 2'-fluoro modified
  modified_base 17: mod_base = OTHER; note = 2'-O-methyl modified
  modified_base 18: mod_base = OTHER; note = 2'-O-methyl modified
  modified_base 19: mod_base = OTHER; note = 2'-fluoro modified
  modified_base 20: mod_base = OTHER; note = 2'-O-methyl modified with phosphodiester linkage to following ribonucleotide
  modified_base 21: mod_base = OTHER; note = 2'-O-methyl modified with phosphodiester linkage to following ribonucleotide
  modified_base 22: mod_base = OTHER; note = 2'-O-methyl modified
  source 1..22: mol_type = other RNA
tatctttgctgacaaacaccgg

SEQ ID NO: 860 - RNA, 22 nt, synthetic construct
  misc_feature 1..22: note = synthetic construct
  modified_base 1: mod_base = OTHER; note = 5'-methoxyphosphonate-4'-oxy modified
  modified_base 2: mod_base = OTHER; note = 2'-fluoro modified with phosphodiester linkage to following ribonucleotide
  modified_base 3: mod_base = OTHER; note = 2'-fluoro modified with phosphodiester linkage to following ribonucleotide
  modified_base 4: mod_base = OTHER; note = 2'-fluoro modified
  modified_base 5: mod_base = OTHER; note = 2'-fluoro modified
  modified_base 6: mod_base = OTHER; note = 2'-O-methyl modified
  modified_base 7: mod_base = OTHER; note = 2'-fluoro modified
  modified_base 8: mod_base = OTHER; note = 2'-fluoro modified
  modified_base 9: mod_base = OTHER; note = 2'-O-methyl modified
  modified_base 10: mod_base = OTHER; note = 2'-fluoro modified
  modified_base 11: mod_base = OTHER; note = 2'-O-methyl modified
  modified_base 12: mod_base = OTHER; note = 2'-O-methyl modified
  modified_base 13: mod_base = OTHER; note = 2'-O-methyl modified
  modified_base 14: mod_base = OTHER; note = 2'-fluoro modified
  modified_base 15: mod_base = OTHER; note = 2'-O-methyl modified
  modified_base 16: mod_base = OTHER; note = 2'-fluoro modified
  modified_base 17: mod_base = OTHER; note = 2'-O-methyl modified
  modified_base 18: mod_base = OTHER; note = 2'-O-methyl modified
  modified_base 19: mod_base = OTHER; note = 2'-fluoro modified
  modified_base 20: mod_base = OTHER; note = 2'-O-methyl modified with phosphodiester linkage to following ribonucleotide
  modified_base 21: mod_base = OTHER; note = 2'-O-methyl modified with phosphodiester linkage to following ribonucleotide
  modified_base 22: mod_base = OTHER; note = 2'-O-methyl modified
  source 1..22: mol_type = other RNA
tacatctttgctgacaaacagg

SEQ ID NO: 861 - RNA, 22 nt, synthetic construct
  misc_feature 1..22: note = synthetic construct
  modified_base 1: mod_base = OTHER; note = 5'-methoxyphosphonate-4'-oxy modified
  modified_base 2: mod_base = OTHER; note = 2'-fluoro modified with phosphodiester linkage to following ribonucleotide
  modified_base 3: mod_base = OTHER; note = 2'-fluoro modified with phosphodiester linkage to following ribonucleotide
  modified_base 4: mod_base = OTHER; note = 2'-fluoro modified
  modified_base 5: mod_base = OTHER; note = 2'-fluoro modified
  modified_base 6: mod_base = OTHER; note = 2'-O-methyl modified
  modified_base 7: mod_base = OTHER; note = 2'-fluoro modified
  modified_base 8: mod_base = OTHER; note = 2'-fluoro modified
  modified_base 9: mod_base = OTHER; note = 2'-O-methyl modified
  modified_base 10: mod_base = OTHER; note = 2'-fluoro modified
  modified_base 11: mod_base = OTHER; note = 2'-O-methyl modified
  modified_base 12: mod_base = OTHER; note = 2'-O-methyl modified
  modified_base 13: mod_base = OTHER; note = 2'-O-methyl modified
  modified_base 14: mod_base = OTHER; note = 2'-fluoro modified
  modified_base 15: mod_base = OTHER; note = 2'-O-methyl modified
  modified_base 16: mod_base = OTHER; note = 2'-fluoro modified
  modified_base 17: mod_base = OTHER; note = 2'-O-methyl modified
  modified_base 18: mod_base = OTHER; note = 2'-O-methyl modified
  modified_base 19: mod_base = OTHER; note = 2'-fluoro modified
  modified_base 20: mod_base = OTHER; note = 2'-O-methyl modified with phosphodiester linkage to following ribonucleotide
  modified_base 21: mod_base = OTHER; note = 2'-O-methyl modified with phosphodiester linkage to following ribonucleotide
  modified_base 22: mod_base = OTHER; note = 2'-O-methyl modified
  source 1..22: mol_type = other RNA
tatgacggaggcattgaagggg

SEQ ID NO: 862 - RNA, 22 nt, synthetic construct
  misc_feature 1..22: note = synthetic construct
  modified_base 1: mod_base = OTHER; note = 5'-methoxyphosphonate-4'-oxy modified
  modified_base 2: mod_base = OTHER; note = 2'-fluoro modified with phosphodiester linkage to following ribonucleotide
  modified_base 3: mod_base = OTHER; note = 2'-fluoro modified with phosphodiester linkage to following ribonucleotide
  modified_base 4: mod_base = OTHER; note = 2'-fluoro modified
  modified_base 5: mod_base = OTHER; note = 2'-fluoro modified
  modified_base 6: mod_base = OTHER; note = 2'-O-methyl modified
  modified_base 7: mod_base = OTHER; note = 2'-fluoro modified
  modified_base 8: mod_base = OTHER; note = 2'-fluoro modified
  modified_base 9: mod_base = OTHER; note = 2'-O-methyl modified
  modified_base 10: mod_base = OTHER; note = 2'-fluoro modified
  modified_base 11: mod_base = OTHER; note = 2'-O-methyl modified
  modified_base 12: mod_base = OTHER; note = 2'-O-methyl modified
  modified_base 13: mod_base = OTHER; note = 2'-O-methyl modified
  modified_base 14: mod_base = OTHER; note = 2'-fluoro modified
  modified_base 15: mod_base = OTHER; note = 2'-O-methyl modified
  modified_base 16: mod_base = OTHER; note = 2'-fluoro modified
  modified_base 17: mod_base = OTHER; note = 2'-O-methyl modified
  modified_base 18: mod_base = OTHER; note = 2'-O-methyl modified
  modified_base 19: mod_base = OTHER; note = 2'-fluoro modified
  modified_base 20: mod_base = OTHER; note = 2'-O-methyl modified with phosphodiester linkage to following ribonucleotide
  modified_base 21: mod_base = OTHER; note = 2'-O-methyl modified with phosphodiester linkage to following ribonucleotide
  modified_base 22: mod_base = OTHER; note = 2'-O-methyl modified
  source 1..22: mol_type = other RNA
tagatgacggaggcattgaagg

SEQ ID NO: 863 - RNA, 22 nt, synthetic construct
  misc_feature 1..22: note = synthetic construct
  modified_base 1: mod_base = OTHER; note = 5'-methoxyphosphonate-4'-oxy modified
  modified_base 2: mod_base = OTHER; note = 2'-fluoro modified with phosphodiester linkage to following ribonucleotide
  modified_base 3: mod_base = OTHER; note = 2'-fluoro modified with phosphodiester linkage to following ribonucleotide
  modified_base 4: mod_base = OTHER; note = 2'-fluoro modified
  modified_base 5: mod_base = OTHER; note = 2'-fluoro modified
  modified_base 6: mod_base = OTHER; note = 2'-O-methyl modified
  modified_base 7: mod_base = OTHER; note = 2'-fluoro modified
  modified_base 8: mod_base = OTHER; note = 2'-fluoro modified
  modified_base 9: mod_base = OTHER; note = 2'-O-methyl modified
  modified_base 10: mod_base = OTHER; note = 2'-fluoro modified
  modified_base 11: mod_base = OTHER; note = 2'-O-methyl modified
  modified_base 12: mod_base = OTHER; note = 2'-O-methyl modified
  modified_base 13: mod_base = OTHER; note = 2'-O-methyl modified
  modified_base 14: mod_base = OTHER; note = 2'-fluoro modified
  modified_base 15: mod_base = OTHER; note = 2'-O-methyl modified
  modified_base 16: mod_base = OTHER; note = 2'-fluoro modified
  modified_base 17: mod_base = OTHER; note = 2'-O-methyl modified
  modified_base 18: mod_base = OTHER; note = 2'-O-methyl modified
  modified_base 19: mod_base = OTHER; note = 2'-fluoro modified
  modified_base 20: mod_base = OTHER; note = 2'-O-methyl modified with phosphodiester linkage to following ribonucleotide
  modified_base 21: mod_base = OTHER; note = 2'-O-methyl modified with phosphodiester linkage to following ribonucleotide
  modified_base 22: mod_base = OTHER; note = 2'-O-methyl modified
  source 1..22: mol_type = other RNA
tgaatctcagtgcttcctgcgg

SEQ ID NO: 864 - DNA, 14 bp, synthetic construct
  misc_feature 1..14: note = synthetic construct
  source 1..14: mol_type = other DNA
ccctggccatgttg

SEQ ID NO: 865 - DNA, 17 bp, synthetic construct
  misc_feature 1..17: note = synthetic construct
  source 1..17: mol_type = other DNA
tggaggtggagaagcca

SEQ ID NO: 866 - DNA, 20 bp, synthetic construct
  misc_feature 1..20: note = synthetic construct
  source 1..20: mol_type = other DNA
gaccatacaagcccctcaag

SEQ ID NO: 867 - DNA, 25 bp, synthetic construct
  misc_feature 1..25: note = synthetic construct
  source 1..25: mol_type = other DNA
tggtgtttgtcagcaaagatgtggc

SEQ ID NO: 868 - DNA, 17 bp, synthetic construct
  misc_feature 1..17: note = synthetic construct
  source 1..17: mol_type = other DNA
aggaagctctgggagta

SEQ ID NO: 869 - DNA, 19 bp, synthetic construct
  misc_feature 1..19: note = synthetic construct
  source 1..19: mol_type = other DNA
cctccttagggtacttgtc

SEQ ID NO: 870 - DNA, 25 bp, synthetic construct
  misc_feature 1..25: note = synthetic construct
  source 1..25: mol_type = other DNA
atggaagagaagcagatcctgtgcg

SEQ ID NO: 871 - RNA, 16 nt, synthetic construct
  misc_feature 1..16: note = synthetic construct
  source 1..16: mol_type = other RNA
gcagccgaaaggctgc

SEQ ID NO: 872 - RNA, 36 nt, synthetic construct; identical to SEQ ID NO: 793
  misc_feature 1..36: note = synthetic construct
  source 1..36: mol_type = other RNA

SEQ ID NO: 873 - RNA, 36 nt, synthetic construct; identical to SEQ ID NO: 792
  misc_feature 1..36: note = synthetic construct
  source 1..36: mol_type = other RNA

SEQ ID NO: 874 - RNA, 36 nt, synthetic construct; identical to SEQ ID NO: 790
  misc_feature 1..36: note = synthetic construct
  source 1..36: mol_type = other RNA

SEQ ID NO: 875 - RNA, 36 nt, synthetic construct; identical to SEQ ID NO: 798
  misc_feature 1..36: note = synthetic construct
  source 1..36: mol_type = other RNA

SEQ ID NO: 876 - RNA, 36 nt, synthetic construct; identical to SEQ ID NO: 797
  misc_feature 1..36: note = synthetic construct
  source 1..36: mol_type = other RNA

SEQ ID NO: 877 - RNA, 36 nt, synthetic construct; identical to SEQ ID NO: 795
  misc_feature 1..36: note = synthetic construct
  source 1..36: mol_type = other RNA

SEQ ID NO: 878 - RNA, 36 nt, synthetic construct; identical to SEQ ID NO: 796
  misc_feature 1..36: note = synthetic construct
  source 1..36: mol_type = other RNA

SEQ ID NO: 879 - RNA, 22 nt, synthetic construct
  misc_feature 1..22: note = synthetic construct
  source 1..22: mol_type = other RNA
tattgaaggtgtctccagctgg

SEQ ID NO: 880 - RNA, 22 nt, synthetic construct
  misc_feature 1..22: note = synthetic construct
  source 1..22: mol_type = other RNA
tgcacagcccctttcctcacgg

SEQ ID NO: 881 - RNA, 22 nt, synthetic construct
  misc_feature 1..22: note = synthetic construct
  source 1..22: mol_type = other RNA
tcagcccctttcctcacacggg

SEQ ID NO: 882 - RNA, 22 nt, synthetic construct
  misc_feature 1..22: note = synthetic construct
  source 1..22: mol_type = other RNA
tatcaaccttctcaaagtctgg

SEQ ID NO: 883 - RNA, 22 nt, synthetic construct
  misc_feature 1..22: note = synthetic construct
  source 1..22: mol_type = other RNA
tcaaccttctcaaagtctgtgg

SEQ ID NO: 884 - RNA, 22 nt, synthetic construct
  misc_feature 1..22: note = synthetic construct
  source 1..22: mol_type = other RNA
taaagtctgtagcagacacagg

SEQ ID NO: 885 - RNA, 22 nt, synthetic construct
  misc_feature 1..22: note = synthetic construct
  source 1..22: mol_type = other RNA
ttctcaaagtctgtagcagagg

SEQ ID NO: 886 - RNA, 36 nt, synthetic construct; identical to SEQ ID NO: 774
  misc_feature 1..36: note = synthetic construct
  source 1..36: mol_type = other RNA

SEQ ID NO: 887 - RNA, 36 nt, synthetic construct; identical to SEQ ID NO: 775
  misc_feature 1..36: note = synthetic construct
  source 1..36: mol_type = other RNA

SEQ ID NO: 888 - RNA, 36 nt, synthetic construct; identical to SEQ ID NO: 776
  misc_feature 1..36: note = synthetic construct
  source 1..36: mol_type = other RNA

SEQ ID NO: 889 - RNA, 36 nt, synthetic construct; identical to SEQ ID NO: 777
  misc_feature 1..36: note = synthetic construct
  source 1..36: mol_type = other RNA

SEQ ID NO: 890 - RNA, 36 nt, synthetic construct; identical to SEQ ID NO: 778
  misc_feature 1..36: note = synthetic construct
  source 1..36: mol_type = other RNA

SEQ ID NO: 891 - RNA, 36 nt, synthetic construct; identical to SEQ ID NO: 779
  misc_feature 1..36: note = synthetic construct
  source 1..36: mol_type = other RNA

SEQ ID NO: 892 - RNA, 36 nt, synthetic construct; identical to SEQ ID NO: 780
  misc_feature 1..36: note = synthetic construct
  source 1..36: mol_type = other RNA

SEQ ID NO: 893 - RNA, 36 nt, synthetic construct; identical to SEQ ID NO: 781
  misc_feature 1..36: note = synthetic construct
  source 1..36: mol_type = other RNA

SEQ ID NO: 894 - RNA, 36 nt, synthetic construct; identical to SEQ ID NO: 782
  misc_feature 1..36: note = synthetic construct
  source 1..36: mol_type = other RNA

SEQ ID NO: 895 - RNA, 36 nt, synthetic construct; identical to SEQ ID NO: 783
  misc_feature 1..36: note = synthetic construct
  source 1..36: mol_type = other RNA

SEQ ID NO: 896 - RNA, 36 nt, synthetic construct; identical to SEQ ID NO: 784
  misc_feature 1..36: note = synthetic construct
  source 1..36: mol_type = other RNA

SEQ ID NO: 897 - RNA, 36 nt, synthetic construct; identical to SEQ ID NO: 785
  misc_feature 1..36: note = synthetic construct
  source 1..36: mol_type = other RNA

SEQ ID NO: 898 - RNA, 36 nt, synthetic construct; identical to SEQ ID NO: 786
  misc_feature 1..36: note = synthetic construct
  source 1..36: mol_type = other RNA

SEQ ID NO: 899 - RNA, 36 nt, synthetic construct; identical to SEQ ID NO: 787
  misc_feature 1..36: note = synthetic construct
  source 1..36: mol_type = other RNA

SEQ ID NO: 900 - RNA, 36 nt, synthetic construct; identical to SEQ ID NO: 788
  misc_feature 1..36: note = synthetic construct
  source 1..36: mol_type = other RNA

SEQ ID NO: 901 - RNA, 36 nt, synthetic construct; identical to SEQ ID NO: 789
  misc_feature 1..36: note = synthetic construct
  source 1..36: mol_type = other RNA

SEQ ID NO: 902 - RNA, 36 nt, synthetic construct; identical to SEQ ID NO: 791
  misc_feature 1..36: note = synthetic construct
  source 1..36: mol_type = other RNA

SEQ ID NO: 903 - RNA, 36 nt, synthetic construct; identical to SEQ ID NO: 794
  misc_feature 1..36: note = synthetic construct
  source 1..36: mol_type = other RNA

SEQ ID NO: 904 - RNA, 36 nt, synthetic construct; identical to SEQ ID NO: 799
  misc_feature 1..36: note = synthetic construct
  source 1..36: mol_type = other RNA

SEQ ID NO: 905 - RNA, 36 nt, synthetic construct; identical to SEQ ID NO: 800
  misc_feature 1..36: note = synthetic construct
  source 1..36: mol_type = other RNA

SEQ ID NO: 906 - RNA, 36 nt, synthetic construct; identical to SEQ ID NO: 801
  misc_feature 1..36: note = synthetic construct
  source 1..36: mol_type = other RNA

SEQ ID NO: 907 - RNA, 36 nt, synthetic construct; identical to SEQ ID NO: 802
  misc_feature 1..36: note = synthetic construct
  source 1..36: mol_type = other RNA

SEQ ID NO: 908 - RNA, 36 nt, synthetic construct; identical to SEQ ID NO: 803
  misc_feature 1..36: note = synthetic construct
  source 1..36: mol_type = other RNA

SEQ ID NO: 909 - RNA, 36 nt, synthetic construct; identical to SEQ ID NO: 804
  misc_feature 1..36: note = synthetic construct
  source 1..36: mol_type = other RNA

SEQ ID NO: 910 - RNA, 36 nt, synthetic construct; identical to SEQ ID NO: 806
  misc_feature 1..36: note = synthetic construct
  source 1..36: mol_type = other RNA

SEQ ID NO: 911 - RNA, 36 nt, synthetic construct; identical to SEQ ID NO: 814
  misc_feature 1..36: note = synthetic construct
  source 1..36: mol_type = other RNA

SEQ ID NO: 912 - RNA, 22 nt, synthetic construct
  misc_feature 1..22: note = synthetic construct
  source 1..22: mol_type = other RNA
ttctgcttctcttccatgaggg

SEQ ID NO: 913 - RNA, 22 nt, synthetic construct
  misc_feature 1..22: note = synthetic construct
  source 1..22: mol_type = other RNA
tacaggatctgcttctcttcgg

SEQ ID NO: 914 - RNA, 22 nt, synthetic construct
  misc_feature 1..22: note = synthetic construct
  source 1..22: mol_type = other RNA
tagcacaatggtacggttgcgg

SEQ ID NO: 915 - RNA, 22 nt, synthetic construct
  misc_feature 1..22: note = synthetic construct
  source 1..22: mol_type = other RNA
tagcagacacatctggcagggg

SEQ ID NO: 916 - RNA, 22 nt, synthetic construct
  misc_feature 1..22: note = synthetic construct
  source 1..22: mol_type = other RNA
ttagcagacacatctggcaggg

SEQ ID NO: 917 - RNA, 22 nt, synthetic construct
  misc_feature 1..22: note = synthetic construct
  source 1..22: mol_type = other RNA
ttctgtagcagacacatctggg

SEQ ID NO: 918 - RNA, 22 nt, synthetic construct
  misc_feature 1..22: note = synthetic construct
  source 1..22: mol_type = other RNA
tgatcaaccttctcaaagtcgg

SEQ ID NO: 919 - RNA, 22 nt, synthetic construct
  misc_feature 1..22: note = synthetic construct
  source 1..22: mol_type = other RNA
tagatcaaccttctcaaagtgg

SEQ ID NO: 920 - RNA, 22 nt, synthetic construct
  misc_feature 1..22: note = synthetic construct
  source 1..22: mol_type = other RNA
ttcagatcaaccttctcaaagg

SEQ ID NO: 921 - RNA, 22 nt, synthetic construct
  misc_feature 1..22: note = synthetic construct
  source 1..22: mol_type = other RNA
ttctccgtagccaaacagctgg

SEQ ID NO: 922 - RNA, 22 nt, synthetic construct
  misc_feature 1..22: note = synthetic construct
  source 1..22: mol_type = other RNA
ttctttgctgacaaacaccagg

SEQ ID NO: 923 - RNA, 22 nt, synthetic construct
  misc_feature 1..22: note = synthetic construct
  source 1..22: mol_type = other RNA
tacatctttgctgacaaacagg

SEQ ID NO: 924 - RNA, 22 nt, synthetic construct
  misc_feature 1..22: note = synthetic construct
  source 1..22: mol_type = other RNA
taggcattgaaggtgtctccgg

SEQ ID NO: 925 - RNA, 22 nt, synthetic construct
  misc_feature 1..22: note = synthetic construct
  source 1..22: mol_type = other RNA
tatgacggaggcattgaagggg

SEQ ID NO: 926 - RNA, 22 nt, synthetic construct
  misc_feature 1..22: note = synthetic construct
  source 1..22: mol_type = other RNA
tagatgacggaggcattgaagg

SEQ ID NO: 927 - RNA, 22 nt, synthetic construct
  misc_feature 1..22: note = synthetic construct
  source 1..22: mol_type = other RNA
tccctttcctcacacgaccagg

SEQ ID NO: 928 - RNA, 22 nt, synthetic construct
  misc_feature 1..22: note = synthetic construct
  source 1..22: mol_type = other RNA
tcacagcccctttcctcacagg

SEQ ID NO: 929 - RNA, 22 nt, synthetic construct
  misc_feature 1..22: note = synthetic construct
  source 1..22: mol_type = other RNA
tcctttcctcacacgaccatgg

SEQ ID NO: 930 - RNA, 22 nt, synthetic construct
  misc_feature 1..22: note = synthetic construct
  source 1..22: mol_type = other RNA
ttctcaaagtctgtagcagagg

SEQ ID NO: 931 - RNA, 22 nt, synthetic construct
  misc_feature 1..22: note = synthetic construct
  source 1..22: mol_type = other RNA
tcttgaactgggtcagatcagg

SEQ ID NO: 932 - RNA, 22 nt, synthetic construct
  misc_feature 1..22: note = synthetic construct
  source 1..22: mol_type = other RNA
taaacaccacgtctccgtaggg

SEQ ID NO: 933 - RNA, 22 nt, synthetic construct
  misc_feature 1..22: note = synthetic construct
  source 1..22: mol_type = other RNA
tcatctttgctgacaaacacgg

SEQ ID NO: 934 - RNA, 22 nt, synthetic construct
  misc_feature 1..22: note = synthetic construct
  source 1..22: mol_type = other RNA
tccacatctttgctgacaaagg

SEQ ID NO: 935 - RNA, 22 nt, synthetic construct
  misc_feature 1..22: note = synthetic construct
  source 1..22: mol_type = other RNA
ttgctgactggaaccccaaggg

SEQ ID NO: 936 - RNA, 22 nt, synthetic construct
  misc_feature 1..22: note = synthetic construct
  source 1..22: mol_type = other RNA
tgaatctcagtgcttcctgcgg

SEQ ID NO: 937 - RNA, 22 nt, synthetic construct
  misc_feature 1..22: note = synthetic construct
  source 1..22: mol_type = other RNA
tagttgttgatgatgcagcagg

SEQ ID NO: 938 - RNA, 22 nt, synthetic construct
  misc_feature 1..22: note = synthetic construct
  source 1..22: mol_type = other RNA
tatctttgctgacaaacaccgg

SEQ ID NO: 939 - DNA, 25 bp, synthetic construct
  misc_feature 1..25: note = synthetic construct
  source 1..25: mol_type = other DNA
gctcttccagttgtttagctatggt

SEQ ID NO: 940 - DNA, 20 bp, synthetic construct
  misc_feature 1..20: note = synthetic construct
  source 1..20: mol_type = other DNA
caggtgcttggccacatctt

SEQ ID NO: 941 - DNA, 17 bp, synthetic construct
  misc_feature 1..17: note = synthetic construct
  source 1..17: mol_type = other DNA
aggtggtgtttgtcagc

SEQ ID NO: 942 - RNA, 19 nt, synthetic construct
  misc_feature 1..19: note = synthetic construct
  source 1..19: mol_type = other RNA
gaagagaagcagatcctgt

SEQ ID NO: 943 - RNA, 19 nt, synthetic construct
  misc_feature 1..19: note = synthetic construct
  source 1..19: mol_type = other RNA
cagatgtgtctgctacaga

SEQ ID NO: 944 - RNA, 19 nt, synthetic construct
  misc_feature 1..19: note = synthetic construct
  source 1..19: mol_type = other RNA
gactttgagaaggttgatc

SEQ ID NO: 945 - RNA, 19 nt, synthetic construct
  misc_feature 1..19: note = synthetic construct
  source 1..19: mol_type = other RNA
tttgagaaggttgatctga

SEQ ID NO: 946 - RNA, 19 nt, synthetic construct
  misc_feature 1..19: note = synthetic construct
  source 1..19: mol_type = other RNA
tgtttgtcagcaaagatgt

SEQ ID NO: 947 - RNA, 19 nt, synthetic construct
  misc_feature 1..19: note = synthetic construct
  source 1..19: mol_type = other RNA
gcaggaagcactgagattc

SEQ ID NO: 948 - RNA, 19 nt, synthetic construct
  misc_feature 1..19: note = synthetic construct
  source 1..19: mol_type = other RNA
acaggatctgcttctcttc

SEQ ID NO: 949 - RNA, 19 nt, synthetic construct
  misc_feature 1..19: note = synthetic construct
  source 1..19: mol_type = other RNA
tctgtagcagacacatctg

SEQ ID NO: 950 - RNA, 19 nt, synthetic construct
  misc_feature 1..19: note = synthetic construct
  source 1..19: mol_type = other RNA
gatcaaccttctcaaagtc

SEQ ID NO: 951 - RNA, 19 nt, synthetic construct
  misc_feature 1..19: note = synthetic construct
  source 1..19: mol_type = other RNA
tcagatcaaccttctcaaa

SEQ ID NO: 952 - RNA, 19 nt, synthetic construct
  misc_feature 1..19: note = synthetic construct
  source 1..19: mol_type = other RNA
acatctttgctgacaaaca

SEQ ID NO: 953 - RNA, 19 nt, synthetic construct
  misc_feature 1..19: note = synthetic construct
  source 1..19: mol_type = other RNA
gaatctcagtgcttcctgc

1. A double stranded RNAi oligonucleotide for reducing ketohexokinase (KHK) expression, the oligonucleotide comprising:
an antisense strand and a sense strand, wherein the antisense strand and the sense strand form a duplex region, wherein the antisense strand comprises a region of complementarity to a KHK mRNA target sequence of any one of SEQ ID NOs: 4-387 and wherein the region of complementarity is at least 15 contiguous nucleotides in length, or a pharmaceutically acceptable salt thereof,
wherein the sense strand comprises a sequence set forth in any one of SEQ ID NOs: 4-387 and/or the antisense strand comprises a sequence set forth in any one of SEQ ID NOs: 388-771.

2. A double stranded RNAi oligonucleotide for inhibiting expression of KHK, wherein said double stranded RNAi oligonucleotide comprises a sense strand and an antisense strand forming a duplex region, wherein said sense strand comprises at least 15 contiguous nucleotides differing by no more than 3 nucleotides from any one of the nucleotide sequences of SEQ ID NO: 4-387 and said antisense strand comprises at least 15 contiguous nucleotides differing by no more than 3 nucleotides from any one of the nucleotide sequences of SEQ ID NO: 388-771, or a pharmaceutically acceptable salt thereof,
wherein the sense strand is 18 to 36 nucleotides in length and/or the antisense strand is 15-30 nucleotides in length.

3. A double stranded RNAi (dsRNAi) oligonucleotide for reducing or inhibiting ketohexokinase (KHK) expression, the oligonucleotide comprising:
(i) an antisense strand of 19-30 nucleotides in length, wherein the antisense strand comprises a nucleotide sequence comprising a region of complementarity to a KHK mRNA target sequence, wherein the region of complementarity is selected from SEQ ID NOs: 948-953; and
(ii) a sense strand of 19-50 nucleotides in length comprising a region of complementarity to the antisense strand,
wherein the antisense and sense strands are separate strands which form an asymmetric duplex region having an overhang of 1-4 nucleotides at the 3′ terminus of the antisense strand.

4. The RNAi oligonucleotide of claim 1, wherein the region of complementarity comprised by the antisense strand is at least 19 contiguous nucleotides in length.

5. The RNAi oligonucleotide of claim 1, wherein the duplex region is at least 20 nucleotides in length.

6. The RNAi oligonucleotide of claim 1, wherein the sense strand comprises at its 3′ end a stem-loop set forth as: S1-L-S2, wherein S1 is complementary to S2, and wherein L forms a loop between S1 and S2 of 3 to 5 nucleotides in length.

7. The RNAi oligonucleotide of claim 6, wherein at least one nucleotide of the loop is conjugated to one or more targeting ligands, and wherein each targeting ligand comprises an N-acetylgalactosamine (GalNAc) moiety.

8. The RNAi oligonucleotide of claim 3, wherein the overhang is 2 nucleotides in length and is selected from AA, GG, AG, and GA.

9. The RNAi oligonucleotide of claim 1, wherein (i) all the nucleotides of the oligonucleotide are modified, (ii) 10-15%, 10%, 11%, 12%, 13%, 14% or 15% of the nucleotides of the sense strand comprise a 2′-fluoro modification, and/or (iii) about 25-35%, 25%, 26%, 27%, 28%, 29%, 30%, 31%, 32%, 33%, 34% or 35% of the nucleotides of the antisense strand comprise a 2′-fluoro modification.

10. The RNAi oligonucleotide of claim 1, wherein the antisense strand comprises at least one phosphorothioate linkage between positions 1 and 2, between positions 2 and 3, and between positions 3 and 4, wherein positions are numbered 1-4 from 5′ to 3′.

11. The RNAi oligonucleotide of claim 1, wherein the 4′-carbon of the sugar of the 5′-terminal nucleotide of the antisense strand comprises a 4′-phosphate analog comprising 5′-methoxyphosphonate-4′-oxy.

12. The RNAi oligonucleotide of claim 1, wherein the antisense strand is 22 nucleotides in length and/or wherein the sense strand is 36 nucleotides in length.

13. The RNAi oligonucleotide of claim 1, wherein the sense and antisense strands comprise the nucleotide sequences set forth in
(a) SEQ ID NOs: 887 and 913, respectively, or
(b) SEQ ID NOs: 891 and 917, respectively, or
(c) SEQ ID NOs: 892 and 918, respectively, or
(d) SEQ ID NOs: 894 and 920, respectively, or
(e) SEQ ID NOs: 897 and 923, respectively, or
(f) SEQ ID NOs: 909 and 936, respectively.

14. A double stranded RNAi oligonucleotide (dsRNAi) for inhibiting expression of KHK, wherein said dsRNAi comprises a sense strand and an antisense strand, the antisense strand comprising a region of complementarity to a KHK RNA transcript, wherein
(a) the sense strand comprises the sequence and all of the modifications of 5-mG-S-mA-mA-mG-mA-mG-mA-fA-fG-fC-fA-mG-mA-mU-mC-mC-mU-mG-mU-mA-mG-mC-mA-mG-mC-mC-mG-[ademA-GalNAc]-[ademA-GalNAc]-[ademA-GalNAc]-mG-mG-mC-mU-mG-mC-3 (SEQ ID NO: 775), and the antisense strand comprises the sequence and all of the modifications of 5-[MePhosphonate-40-mU]-S-fA-S-fC-fA-fG-mG-fA-mU-mC-fU-mG-mC-mU-fU-mC-mU-mC-mU-mU-mC-S-mG-S-mG-3′ (SEQ ID NO: 820); or
(b) the sense strand comprises the sequence and all of the modifications of 5-mC-S-mA-mG-mA-mU-mG-mU-fG-fU-fC-fU-mG-mC-mU-mA-mC-mA-mG-mA-mA-mG-mC-mA-mG-mC-mC-mG-[ademA-GalNAc]-[ademA-GalNAc]-[ademA-GalNAc]-mG-mG-mC-mU-mG-mC-3′ (SEQ ID NO: 779), and
the antisense strand comprises the sequence and all of the modifications of 5-[MePhosphonate-40-mU]-S-fU-S-fC-S-fU-fG-mU-fA-mG-mC-fA-mG-mA-mC-fA-mC-mA-mU-mC-mU-mG-S-mG-S-mG-3 (SEQ ID NO: 824); or
(c) the sense strand comprises the sequence and all of the modifications of 5-mG-S-mA-mC-mU-mU-mU-mG-fA-fG-fA-fA-mG-mG-mU-mU-mG-mA-mU-mC-mA-mG-mC-mA-mG-mC-mC-mG-[ademA-GalNAc]-[ademA-GalNAc]-[ademA-GalNAc]-mG-mG-mC-mU-mG-mC-3 (SEQ ID NO: 780), and
the antisense strand comprises the sequence and all of the modifications of 5 -[MePhosphonate-40-mU]-S-fG-S-fA-S-fU-fC-mA-fA-mC-mC-fU-mU-mC-mU-fC-mA-mA-mA-mG-mU-mC-S-mG-S-mG-3 (SEQ ID NO: 825); or
(d) the sense strand comprises the sequence and all of the modifications of 5′-mU-S-mU-mU-mG-mA-mG-mA-fA-fG-fG-fU-mU-mG-mA-mU-mC-mU-mG-mA-mA-mG-mC-mA-mG-mC-mC-mG-[ademA-GalNAc]-[ademA-GalNAc]-[ademA-GalNAc]-mG-mG-mC-mU-mG-mC-3′ (SEQ ID NO: 782), and
the antisense strand comprises the sequence and all of the modifications of 5′ [MePhosphonate-40-mU]-S-fU-S-fC-S-fA-fG-mA-fU-mC-mA-fA-mC-mC-mU-fU-mC-mU-mC-mA-mA-mA-S-mG-S-mG-3′ (SEQ ID NO: 827); or
(e) the sense strand comprises the sequence and all of the modifications of 5-mU-S-mG-mU-mU-mU-mG-mU-fC-fA-fG-fC-mA-mA-mA-mG-mA-mU-mG-mU-mA-mG-mC-mA-mG-mC-mC-mG-[ademA-GalNAc]-[ademA-GalNAc]-[ademA-GalNAc]-mG-mG-mC-mU-mG-mC-3 (SEQ ID NO: 785), and
the antisense strand comprises the sequence and all of the modifications of 5-[MePhosphonate-40-mU]-S-fA-S-fC-fA-fU-mC-fU-mU-mU-fG-mC-mU-mG-fA-mC-mA-mA-mA-mC-mA-S-mG-S-mG-3′ (SEQ ID NO: 830); or
(f) the sense strand comprises the sequence and all of the modifications of 5′-mG-S-mC-mA-mG-mG-mA-mA-fG-fC-fA-fC-mU-mG-mA-mG-mA-mU-mU-mC-mA-mG-mC-mA-mG-mC-mC-mG-[ademA-GalNAc]-[ademA-GalNAc]-[ademA-GalNAc]-mG-mG-mC-mU-mG-mC-3′ (SEQ ID NO: 804), and
the antisense strand comprises the sequence and all of the modifications of 5′-[MePhosphonate-40-mU]-S-fG-S-fA-S-fA-fU-mC-fU-mC-mA-fG-mU-mG-mC-fU-mU-mC-mC-mU-mG-mC-S-mG-S-mG-3′ (SEQ ID NO: 849);
wherein mC, mA, mG, mU=2′-OMe ribonucleosides; fA, fC, fG, fU=2′F ribonucleosides; “-“=phosphodiester linkage, “—S-”=phosphorothioate linkage, and wherein ademA-GalNAc= [chemical structure]
or a pharmaceutically acceptable salt thereof.

15. A double stranded RNAi oligonucleotide (dsRNAi) for inhibiting expression of KHK, wherein said dsRNAi comprises
(a) a sense strand comprising SEQ ID NO: 775 and an antisense strand comprising SEQ ID NO: 820, the antisense strand comprising a region of complementarity to a KHK RNA transcript, e.g. KHK mRNA, wherein said dsRNAi is in the form of a conjugate having the structure depicted in FIG. 10A continuing to FIG. 10B; or
(b) a sense strand comprising SEQ ID NO: 779 and an antisense strand comprising SEQ ID NO: 824, the antisense strand comprising a region of complementarity to a KHK RNA transcript, e.g. KHK mRNA, wherein said dsRNAi is in the form of a conjugate having the structure depicted in FIG. 11A continuing to FIG. 11B; or
(c) a sense strand comprising SEQ ID NO: 780 and an antisense strand comprising SEQ ID NO: 825, the antisense strand comprising a region of complementarity to a KHK RNA transcript, e.g. KHK mRNA, wherein said dsRNAi is in the form of a conjugate having the structure depicted in depicted in FIG. 12A continuing to FIG. 12B; or
(d) a sense strand comprising SEQ ID NO: 782 and an antisense strand comprising SEQ ID NO: 827, the antisense strand comprising a region of complementarity to a KHK RNA transcript, e.g. KHK mRNA, wherein said dsRNAi is in the form of a conjugate having the structure depicted in FIG. 13A continuing to FIG. 13B; or
(e) a sense strand comprising SEQ ID NO: 785 and an antisense strand comprising SEQ ID NO: 830, the antisense strand comprising a region of complementarity to a KHK RNA transcript, e.g. KHK mRNA, wherein said dsRNAi is in the form of a conjugate having the structure depicted in FIG. 14A continuing to FIG. 14B; or
(f) a sense strand comprising SEQ ID NO: 804 and an antisense strand comprising SEQ ID NO: 849, the antisense strand comprising a region of complementarity to a KHK RNA transcript, e.g. KHK mRNA, wherein said dsRNAi is in the form of a conjugate having the structure depicted in FIG. 15A continuing to FIG. 15B;
or a pharmaceutically acceptable salt thereof.

16. A pharmaceutical composition comprising the dsRNAi oligonucleotide of claim 1, or a pharmaceutically acceptable salt thereof, and at least one pharmaceutically acceptable carrier, delivery agent or excipient.

17. A method for treating a disease, disorder or condition associated with KHK expression, comprising administering to a patient in need thereof a pharmaceutically effective amount of the RNAi oligonucleotide of claim 1.

18. The method of claim 17, wherein the disease, disorder or condition is selected from the group consisting of non-alcoholic fatty liver disease (NAFLD) and non-alcoholic steatohepatitis (NASH).

19. The method of claim 18, further comprising administering the RNAi in combination with a second therapeutic agent.

20. A method for reducing KHK expression in a cell, a population of cells or a subject, the method comprising the step of:
i. contacting the cell or the population of cells with the RNAi oligonucleotide, or a pharmaceutically acceptable salt thereof, of claim 1; or
ii. administering to the subject the RNAi oligonucleotide, or a pharmaceutically acceptable salt thereof of claim 1.
